United States Patent Application Publication US 2024/0026386 A1 - sequence listing, part 2

SEQ ID NO: 25186 - RNA, 20 nt, Artificial Sequence
  spacer sequence TTCN PAM
cccagcuuuuuacagcuccc

SEQ ID NO: 25187 - RNA, 20 nt, Artificial Sequence
  spacer sequence TTCN PAM
guacuauuuucaacugcccc

SEQ ID NO: 25188 - RNA, 20 nt, Artificial Sequence
  spacer sequence TTCN PAM
acugccccucccccauauga

SEQ ID NO: 25189 - RNA, 20 nt, Artificial Sequence
  spacer sequence TTCN PAM
aagugucucauaugggggag

SEQ ID NO: 25190 - RNA, 20 nt, Artificial Sequence
  spacer sequence TTCN PAM
aguguucaaagugucucaua

SEQ ID NO: 25191 - RNA, 20 nt, Artificial Sequence
  spacer sequence TTCN PAM
auaguaauuauuuuuauucc

SEQ ID NO: 25192 - RNA, 20 nt, Artificial Sequence
  spacer sequence TTCN PAM
guguuucaauaguaauuauu

SEQ ID NO: 25193 - RNA, 20 nt, Artificial Sequence
  spacer sequence TTCN PAM
aguucaguguuucaauagua

SEQ ID NO: 25194 - RNA, 20 nt, Artificial Sequence
  spacer sequence TTCN PAM
caauauugcuaacaaaaucu

SEQ ID NO: 25195 - RNA, 20 nt, Artificial Sequence
  spacer sequence TTCN PAM
cagacugcucucugauggaa

SEQ ID NO: 25196 - RNA, 20 nt, Artificial Sequence
  spacer sequence TTCN PAM
aucagagagcagucugagaa

SEQ ID NO: 25197 - RNA, 20 nt, Artificial Sequence
  spacer sequence TTCN PAM
ccuaguuccaucagagagca

SEQ ID NO: 25198 - RNA, 20 nt, Artificial Sequence
  spacer sequence TTCN PAM
ccaauucuccuaguuccauc

SEQ ID NO: 25199 - RNA, 20 nt, Artificial Sequence
  spacer sequence TTCN PAM
aagugcaguuuguuguuuua

SEQ ID NO: 25200 - RNA, 20 nt, Artificial Sequence
  spacer sequence TTCN PAM
cauuuuuauuaaucaguaca

SEQ ID NO: 25201 - RNA, 20 nt, Artificial Sequence
  spacer sequence TTCN PAM
aaauuuguaacucaaauuau

SEQ ID NO: 25202 - RNA, 20 nt, Artificial Sequence
  spacer sequence TTCN PAM
uaguucaaaauuuguaacuc

SEQ ID NO: 25203 - RNA, 20 nt, Artificial Sequence
  spacer sequence TTCN PAM
cccauuugagcagauggcga

SEQ ID NO: 25204 - RNA, 20 nt, Artificial Sequence
  spacer sequence TTCN PAM
gcaauuuuugguuuuccccc

SEQ ID NO: 25205 - RNA, 20 nt, Artificial Sequence
  spacer sequence TTCN PAM
caccucuuuuuuuuuuauga

SEQ ID NO: 25206 - RNA, 20 nt, Artificial Sequence
  spacer sequence TTCN PAM
ugaauaauuuaaaaaagaaa

SEQ ID NO: 25207 - RNA, 20 nt, Artificial Sequence
  spacer sequence TTCN PAM
ggaauguuguuuauguuauc

SEQ ID NO: 25208 - RNA, 20 nt, Artificial Sequence
  spacer sequence TTCN PAM
uuuuuaaauuauucaggaau

SEQ ID NO: 25209 - RNA, 20 nt, Artificial Sequence
  spacer sequence TTCN PAM
acaacugcuuggugagucca

SEQ ID NO: 25210 - RNA, 20 nt, Artificial Sequence
  spacer sequence TTCN PAM
caaacgugcaauuauuuuuu

SEQ ID NO: 25211 - RNA, 20 nt, Artificial Sequence
  spacer sequence TTCN PAM
uaauuacuuacauagguucu

SEQ ID NO: 25212 - RNA, 20 nt, Artificial Sequence
  spacer sequence TTCN PAM
aucaaaagauucagguucua

SEQ ID NO: 25213 - RNA, 20 nt, Artificial Sequence
  spacer sequence TTCN PAM
gguucuagugcuuuucccac

SEQ ID NO: 25214 - RNA, 20 nt, Artificial Sequence
  spacer sequence TTCN PAM
agugcuuuucccacauauug

SEQ ID NO: 25215 - RNA, 20 nt, Artificial Sequence
  spacer sequence TTCN PAM
cacauauugugcaaaucugc

SEQ ID NO: 25216 - RNA, 20 nt, Artificial Sequence
  spacer sequence TTCN PAM
uacaggucucugacauaguu

SEQ ID NO: 25217 - RNA, 20 nt, Artificial Sequence
  spacer sequence TTCN PAM
aaguauccucugggaguggg

SEQ ID NO: 25218 - RNA, 20 nt, Artificial Sequence
  spacer sequence TTCN PAM
ccccacucccagaggauacu

SEQ ID NO: 25219 - RNA, 20 nt, Artificial Sequence
  spacer sequence TTCN PAM
uuucuccccacucccagagg

SEQ ID NO: 25220 - RNA, 20 nt, Artificial Sequence
  spacer sequence TTCN PAM
uggagacuuuuuucuuuucu

SEQ ID NO: 25221 - RNA, 20 nt, Artificial Sequence
  spacer sequence TTCN PAM
cuccaaguuuggguucaugg

SEQ ID NO: 25222 - RNA, 20 nt, Artificial Sequence
  spacer sequence TTCN PAM
uuguaucuauuuaucuauuu

SEQ ID NO: 25223 - RNA, 20 nt, Artificial Sequence
  spacer sequence TTCN PAM
uuaucacaauucuuuguauc

SEQ ID NO: 25224 - RNA, 20 nt, Artificial Sequence
  spacer sequence TTCN PAM
cacaaaaagauaagauaauu

SEQ ID NO: 25225 - RNA, 20 nt, Artificial Sequence
  spacer sequence TTCN PAM
uucccacaaaaagauaagau

SEQ ID NO: 25226 - RNA, 20 nt, Artificial Sequence
  spacer sequence TTCN PAM
gggcuauugaaagcaguugu

SEQ ID NO: 25227 - RNA, 20 nt, Artificial Sequence
  spacer sequence TTCN PAM
auagcccugaauggcagauc

SEQ ID NO: 25228 - RNA, 20 nt, Artificial Sequence
  spacer sequence TTCN PAM
acuggguccuggaugccaga

SEQ ID NO: 25229 - RNA, 20 nt, Artificial Sequence
  spacer sequence TTCN PAM
cccagcagaagaaacagcag

SEQ ID NO: 25230 - RNA, 20 nt, Artificial Sequence
  spacer sequence TTCN PAM
gcugggggaauaguaaguuc

SEQ ID NO: 25231 - RNA, 20 nt, Artificial Sequence
  spacer sequence TTCN PAM
ucugcugggggaauaguaag

SEQ ID NO: 25232 - RNA, 20 nt, Artificial Sequence
  spacer sequence TTCN PAM
gcuguuucuucugcuggggg

SEQ ID NO: 25233 - RNA, 20 nt, Artificial Sequence
  spacer sequence TTCN PAM
agcaaugaagaugaugagcc

SEQ ID NO: 25234 - RNA, 20 nt, Artificial Sequence
  spacer sequence TTCN PAM
uugcuugaauccuuacaacu

SEQ ID NO: 25235 - RNA, 20 nt, Artificial Sequence
  spacer sequence TTCN PAM
auuacacccccuguaccaau

SEQ ID NO: 25236 - RNA, 20 nt, Artificial Sequence
  spacer sequence TTCN PAM
acaugacagauaaaacaagu

SEQ ID NO: 25237 - RNA, 20 nt, Artificial Sequence
  spacer sequence TTCN PAM
ggcauccuaaaaauaaagaa

SEQ ID NO: 25238 - RNA, 20 nt, Artificial Sequence
  spacer sequence TTCN PAM
uuauuuuuaggaugccugaa

SEQ ID NO: 25239 - RNA, 20 nt, Artificial Sequence
  spacer sequence TTCN PAM
auucuauuaaucacagaaua

SEQ ID NO: 25240 - RNA, 20 nt, Artificial Sequence
  spacer sequence TTCN PAM
auuaaucacagaauaauaug

SEQ ID NO: 25241 - RNA, 20 nt, Artificial Sequence
  spacer sequence TTCN PAM
gugauuaauagaauugaauu

SEQ ID NO: 25242 - RNA, 20 nt, Artificial Sequence
  spacer sequence TTCN PAM
uuuccuuuuuuuuuuuuuua

SEQ ID NO: 25243 - RNA, 20 nt, Artificial Sequence
  spacer sequence TTCN PAM
uuuuuuuuuuuuuuauuuuu

SEQ ID NO: 25244 - RNA, 20 nt, Artificial Sequence
  spacer sequence TTCN PAM
uuaagagaagaaaacucuga

SEQ ID NO: 25245 - RNA, 20 nt, Artificial Sequence
  spacer sequence TTCN PAM
cuuaaagaaaaauaaaaaaa

SEQ ID NO: 25246 - RNA, 20 nt, Artificial Sequence
  spacer sequence TTCN PAM
ucucuuaaagaaaaauaaaa

SEQ ID NO: 25247 - RNA, 20 nt, Artificial Sequence
  spacer sequence TTCN PAM
uauaaacagacauuggcacc

SEQ ID NO: 25248 - RNA, 20 nt, Artificial Sequence
  spacer sequence TTCN PAM
ggcuuuuugaucuuggugcc

SEQ ID NO: 25249 - RNA, 20 nt, Artificial Sequence
  spacer sequence TTCN PAM
cucccccuggcaaaggguga

SEQ ID NO: 25250 - RNA, 20 nt, Artificial Sequence
  spacer sequence TTCN PAM
guuucaguucagguaaaaau

SEQ ID NO: 25251 - RNA, 20 nt, Artificial Sequence
  spacer sequence TTCN PAM
guucagguaaaaaugagggu

SEQ ID NO: 25252 - RNA, 20 nt, Artificial Sequence
  spacer sequence TTCN PAM
gguaaaaaugaggguguaaa

SEQ ID NO: 25253 - RNA, 20 nt, Artificial Sequence
  spacer sequence TTCN PAM
caggccccuggaaugaugag

SEQ ID NO: 25254 - RNA, 20 nt, Artificial Sequence
  spacer sequence TTCN PAM
aggggccugggaauuuacac

SEQ ID NO: 25255 - RNA, 20 nt, Artificial Sequence
  spacer sequence TTCN PAM
ucguguuggaguuggguaga

SEQ ID NO: 25256 - RNA, 20 nt, Artificial Sequence
  spacer sequence TTCN PAM
acccaacuccaacacgauga

SEQ ID NO: 25257 - RNA, 20 nt, Artificial Sequence
  spacer sequence TTCN PAM
ucuacccaacuccaacacga

SEQ ID NO: 25258 - RNA, 20 nt, Artificial Sequence
  spacer sequence TTCN PAM
uuuucuucuacccaacucca

SEQ ID NO: 25259 - RNA, 20 nt, Artificial Sequence
  spacer sequence TTCN PAM
ucauuuucuucuacccaacu

SEQ ID NO: 25260 - RNA, 20 nt, Artificial Sequence
  spacer sequence TTCN PAM
agacgaccuugaacaucagc

SEQ ID NO: 25261 - RNA, 20 nt, Artificial Sequence
  spacer sequence TTCN PAM
aggucgucuggaagcauuuu

SEQ ID NO: 25262 - RNA, 20 nt, Artificial Sequence
  spacer sequence TTCN PAM
acucaaaguauaauuccuug

SEQ ID NO: 25263 - RNA, 20 nt, Artificial Sequence
  spacer sequence TTCN PAM
uugaacauggcagcugcuac

SEQ ID NO: 25264 - RNA, 20 nt, Artificial Sequence
  spacer sequence TTCN PAM
aggaauuauacuuugaguag

SEQ ID NO: 25265 - RNA, 20 nt, Artificial Sequence
  spacer sequence TTCN PAM
uucauaaacaaucucucuaa

SEQ ID NO: 25266 - RNA, 20 nt, Artificial Sequence
  spacer sequence TTCN PAM
uaaacaaucucucuaaacuu

SEQ ID NO: 25267 - RNA, 20 nt, Artificial Sequence
  spacer sequence TTCN PAM
auaaguuuagagagauuguu

SEQ ID NO: 25268 - RNA, 20 nt, Artificial Sequence
  spacer sequence TTCN PAM
auauucuauaaguuuagaga

SEQ ID NO: 25269 - RNA, 20 nt, Artificial Sequence
  spacer sequence TTCN PAM
cauuauacacaauauucaau

SEQ ID NO: 25270 - RNA, 20 nt, Artificial Sequence
  spacer sequence TTCN PAM
uauuucacauuauacacaau

SEQ ID NO: 25271 - RNA, 20 nt, Artificial Sequence
  spacer sequence TTCN PAM
cuuauuuagagucaguucaa

SEQ ID NO: 25272 - RNA, 20 nt, Artificial Sequence
  spacer sequence TTCN PAM
auaccaggugcuuuugagua

SEQ ID NO: 25273 - RNA, 20 nt, Artificial Sequence
  spacer sequence TTCN PAM
gauacucaaaagcaccuggu

SEQ ID NO: 25274 - RNA, 20 nt, Artificial Sequence
  spacer sequence TTCN PAM
guccccucaacaugugacac

SEQ ID NO: 25275 - RNA, 20 nt, Artificial Sequence
  spacer sequence TTCN PAM
uguuguuaacuugucuucgg

SEQ ID NO: 25276 - RNA, 20 nt, Artificial Sequence
  spacer sequence TTCN PAM
ccagucagacuuguauguga

SEQ ID NO: 25277 - RNA, 20 nt, Artificial Sequence
  spacer sequence TTCN PAM
cccgcuuuggggcaccuccc

SEQ ID NO: 25278 - RNA, 20 nt, Artificial Sequence
  spacer sequence TTCN PAM
acugcuggggaggaaugagu

SEQ ID NO: 25279 - RNA, 20 nt, Artificial Sequence
  spacer sequence TTCN PAM
uccccagcaguugaaaauuc

SEQ ID NO: 25280 - RNA, 20 nt, Artificial Sequence
  spacer sequence TTCN PAM
auguagcaaagcccuacuca

SEQ ID NO: 25281 - RNA, 20 nt, Artificial Sequence
  spacer sequence TTCN PAM
cacauuuuccauguagcaaa

SEQ ID NO: 25282 - RNA, 20 nt, Artificial Sequence
  spacer sequence TTCN PAM
acucugagugcucuucucac

SEQ ID NO: 25283 - RNA, 20 nt, Artificial Sequence
  spacer sequence TTCN PAM
gcuacaucaggcaagaugca

SEQ ID NO: 25284 - RNA, 20 nt, Artificial Sequence
  spacer sequence TTCN PAM
ugucacuccacugugcuuca

SEQ ID NO: 25285 - RNA, 20 nt, Artificial Sequence
  spacer sequence TTCN PAM
ccccagacuugccccaaccu

SEQ ID NO: 25286 - RNA, 20 nt, Artificial Sequence
  spacer sequence TTCN PAM
agguucuccccagacuugcc

SEQ ID NO: 25287 - RNA, 20 nt, Artificial Sequence
  spacer sequence TTCN PAM
cagccuugaccugaaucucu

SEQ ID NO: 25288 - RNA, 20 nt, Artificial Sequence
  spacer sequence TTCN PAM
ggucaaggcugugaaugacg

SEQ ID NO: 25289 - RNA, 20 nt, Artificial Sequence
  spacer sequence TTCN PAM
uuugccuagagauucagguc

SEQ ID NO: 25290 - RNA, 20 nt, Artificial Sequence
  spacer sequence TTCN PAM
aaagagcaugucacccagca

SEQ ID NO: 25291 - RNA, 20 nt, Artificial Sequence
  spacer sequence TTCN PAM
auuuuuccaaagagcauguc

SEQ ID NO: 25292 - RNA, 20 nt, Artificial Sequence
  spacer sequence TTCN PAM
cuaaauugccuccagcuuuc

SEQ ID NO: 25293 - RNA, 20 nt, Artificial Sequence
  spacer sequence TTCN PAM
agccauucucuaaauugccu

SEQ ID NO: 25294 - RNA, 20 nt, Artificial Sequence
  spacer sequence TTCN PAM
cugccauucaacuuauuuuu

SEQ ID NO: 25295 - RNA, 20 nt, Artificial Sequence
  spacer sequence TTCN PAM
acuuauuuuucuauuugcca

SEQ ID NO: 25296 - RNA, 20 nt, Artificial Sequence
  spacer sequence TTCN PAM
auuugccagucugcagagga

SEQ ID NO: 25297 - RNA, 20 nt, Artificial Sequence
  spacer sequence TTCN PAM
ucugcagacuggcaaauaga

SEQ ID NO: 25298 - RNA, 20 nt, Artificial Sequence
  spacer sequence TTCN PAM
uuugcauaugggccacuucc

SEQ ID NO: 25299 - RNA, 20 nt, Artificial Sequence
  spacer sequence TTCN PAM
uggugagguccaaaucauuu

SEQ ID NO: 25300 - RNA, 20 nt, Artificial Sequence
  spacer sequence TTCN PAM
uuccuggugagguccaaauc

SEQ ID NO: 25301 - RNA, 20 nt, Artificial Sequence
  spacer sequence TTCN PAM
ccaucuucucuuucauaauu

SEQ ID NO: 25302 - RNA, 20 nt, Artificial Sequence
  spacer sequence TTCN PAM
cuuucauaauugacgaugau

SEQ ID NO: 25303 - RNA, 20 nt, Artificial Sequence
  spacer sequence TTCN PAM
uaauugacgaugaugcuucu

SEQ ID NO: 25304 - RNA, 20 nt, Artificial Sequence
  spacer sequence TTCN PAM
gauggugauuucuauuuaca

SEQ ID NO: 25305 - RNA, 20 nt, Artificial Sequence
  spacer sequence TTCN PAM
auuuacauacacaggauggc

SEQ ID NO: 25306 - RNA, 20 nt, Artificial Sequence
  spacer sequence TTCN PAM
gccauccuguguauguaaau

SEQ ID NO: 25307 - RNA, 20 nt, Artificial Sequence
  spacer sequence TTCN PAM
cauagaaagucuacucuuug

SEQ ID NO: 25308 - RNA, 20 nt, Artificial Sequence
  spacer sequence TTCN PAM
augagaagauucagccaucc

SEQ ID NO: 25309 - RNA, 20 nt, Artificial Sequence
  spacer sequence TTCN PAM
aagaguagacuuucuaugag

SEQ ID NO: 25310 - RNA, 20 nt, Artificial Sequence
  spacer sequence TTCN PAM
auaauuggacugucuaagaa

SEQ ID NO: 25311 - RNA, 20 nt, Artificial Sequence
  spacer sequence TTCN PAM
uagacaguccaauuauagaa

SEQ ID NO: 25312 - RNA, 20 nt, Artificial Sequence
  spacer sequence TTCN PAM
uccuucccugugggggcccc

SEQ ID NO: 25313 - RNA, 20 nt, Artificial Sequence
  spacer sequence TTCN PAM
cugugggggccccaaaaguu

SEQ ID NO: 25314 - RNA, 20 nt, Artificial Sequence
  spacer sequence TTCN PAM
uaaauuugagucuuaccuuu

SEQ ID NO: 25315 - RNA, 20 nt, Artificial Sequence
  spacer sequence TTCN PAM
uucauaaauuugagucuuac

SEQ ID NO: 25316 - RNA, 20 nt, Artificial Sequence
  spacer sequence TTCN PAM
ccaccucuaggaagaaacac

SEQ ID NO: 25317 - RNA, 20 nt, Artificial Sequence
  spacer sequence TTCN PAM
uagagguggagaagagggau

SEQ ID NO: 25318 - RNA, 20 nt, Artificial Sequence
  spacer sequence TTCN PAM
uccuagagguggagaagagg

SEQ ID NO: 25319 - RNA, 20 nt, Artificial Sequence
  spacer sequence TTCN PAM
aguguuucuuccuagaggug

SEQ ID NO: 25320 - RNA, 20 nt, Artificial Sequence
  spacer sequence TTCN PAM
uucagcauccacuauaugca

SEQ ID NO: 25321 - RNA, 20 nt, Artificial Sequence
  spacer sequence TTCN PAM
gcauccacuauaugcacaac

SEQ ID NO: 25322 - RNA, 20 nt, Artificial Sequence
  spacer sequence TTCN PAM
gcaaaagguugugcauauag

SEQ ID NO: 25323 - RNA, 20 nt, Artificial Sequence
  spacer sequence TTCN PAM
uuuaaaaaaugaacccaaau

SEQ ID NO: 25324 - RNA, 20 nt, Artificial Sequence
  spacer sequence TTCN PAM
uuuuuuaaaagaagauucag

SEQ ID NO: 25325 - RNA, 20 nt, Artificial Sequence
  spacer sequence TTCN PAM
caauaucucuauuuggguuc

SEQ ID NO: 25326 - RNA, 20 nt, Artificial Sequence
  spacer sequence TTCN PAM
uccuuguuuucucaauaucu

SEQ ID NO: 25327 - RNA, 20 nt, Artificial Sequence
  spacer sequence TTCN PAM
uuugauuuuagguaauguuu

SEQ ID NO: 25328 - RNA, 20 nt, Artificial Sequence
  spacer sequence TTCN PAM
guuuuuacagggcuggagag

SEQ ID NO: 25329 - RNA, 20 nt, Artificial Sequence
  spacer sequence TTCN PAM
guaaguuggucucuccagcc

SEQ ID NO: 25330 - RNA, 20 nt, Artificial Sequence
  spacer sequence TTCN PAM
ugguuaaaguucuguaaguu

SEQ ID NO: 25331 - RNA, 20 nt, Artificial Sequence
  spacer sequence TTCN PAM
uggcucuugucuuacuuuuc

SEQ ID NO: 25332 - RNA, 20 nt, Artificial Sequence
  spacer sequence TTCN PAM
aguucuauccaguagaaaau

SEQ ID NO: 25333 - RNA, 20 nt, Artificial Sequence
  spacer sequence TTCN PAM
auccaguagaaaauaacagu

SEQ ID NO: 25334 - RNA, 20 nt, Artificial Sequence
  spacer sequence TTCN PAM
acuggauagaacuagaaaag

SEQ ID NO: 25335 - RNA, 20 nt, Artificial Sequence
  spacer sequence TTCN PAM
uacuguuauuuucuacugga

SEQ ID NO: 25336 - RNA, 20 nt, Artificial Sequence
  spacer sequence TTCN PAM
aauagccuucugcuaauuag

SEQ ID NO: 25337 - RNA, 20 nt, Artificial Sequence
  spacer sequence TTCN PAM
gcuaauuagaaaauuacccu

SEQ ID NO: 25338 - RNA, 20 nt, Artificial Sequence
  spacer sequence TTCN PAM
aauuagcagaaggcuauuug

SEQ ID NO: 25339 - RNA, 20 nt, Artificial Sequence
  spacer sequence TTCN PAM
uaagggcugccagcauuguu

SEQ ID NO: 25340 - RNA, 20 nt, Artificial Sequence
  spacer sequence TTCN PAM
guauauuagcagagccauau

SEQ ID NO: 25341 - RNA, 20 nt, Artificial Sequence
  spacer sequence TTCN PAM
gccugcagugauuuuagcag

SEQ ID NO: 25342 - RNA, 20 nt, Artificial Sequence
  spacer sequence TTCN PAM
caguccagggcauggagcau

SEQ ID NO: 25343 - RNA, 20 nt, Artificial Sequence
  spacer sequence TTCN PAM
aggcguguaaaacugacacc

SEQ ID NO: 25344 - RNA, 20 nt, Artificial Sequence
  spacer sequence TTCN PAM
ucuuagcacaccuuagcugu

SEQ ID NO: 25345 - RNA, 20 nt, Artificial Sequence
  spacer sequence TTCN PAM
uagcacaccuuagcugugau

SEQ ID NO: 25346 - RNA, 20 nt, Artificial Sequence
  spacer sequence TTCN PAM
gaucugggaucacagcuaag

SEQ ID NO: 25347 - RNA, 20 nt, Artificial Sequence
  spacer sequence TTCN PAM
cuugagaaugaaggcugcuu

SEQ ID NO: 25348 - RNA, 20 nt, Artificial Sequence
  spacer sequence TTCN PAM
caagagaacuggguuccgau

SEQ ID NO: 25349 - RNA, 20 nt, Artificial Sequence
  spacer sequence TTCN PAM
uucucaagagaacuggguuc

SEQ ID NO: 25350 - RNA, 20 nt, Artificial Sequence
  spacer sequence TTCN PAM
uuacuaacaugucaaagcag

SEQ ID NO: 25351 - RNA, 20 nt, Artificial Sequence
  spacer sequence TTCN PAM
cuuacaggauuuaguuaaaa

SEQ ID NO: 25352 - RNA, 20 nt, Artificial Sequence
  spacer sequence TTCN PAM
gcuguauguuuacaauugau

SEQ ID NO: 25353 - RNA, 20 nt, Artificial Sequence
  spacer sequence TTCN PAM
uauuaagagauuuuauuuaa

SEQ ID NO: 25354 - RNA, 20 nt, Artificial Sequence
  spacer sequence TTCN PAM
caugcauaucagcaaauauu

SEQ ID NO: 25355 - RNA, 20 nt, Artificial Sequence
  spacer sequence TTCN PAM
auguauuacauaauauuugc

SEQ ID NO: 25356 - RNA, 20 nt, Artificial Sequence
  spacer sequence TTCN PAM
auuuugauaucaaaguggau

SEQ ID NO: 25357 - RNA, 20 nt, Artificial Sequence
  spacer sequence TTCN PAM
aaagucagaccauagguguu

SEQ ID NO: 25358 - RNA, 20 nt, Artificial Sequence
  spacer sequence TTCN PAM
uaacauuuuucuaaagucag

SEQ ID NO: 25359 - RNA, 20 nt, Artificial Sequence
  spacer sequence TTCN PAM
uacuuccauucuuaauuaug

SEQ ID NO: 25360 - RNA, 20 nt, Artificial Sequence
  spacer sequence TTCN PAM
auucuuaauuaugacuuggu

SEQ ID NO: 25361 - RNA, 20 nt, Artificial Sequence
  spacer sequence TTCN PAM
uaauuaugacuugguauuau

SEQ ID NO: 25362 - RNA, 20 nt, Artificial Sequence
  spacer sequence TTCN PAM
cuacuucaaauaucaaacag

SEQ ID NO: 25363 - RNA, 20 nt, Artificial Sequence
  spacer sequence TTCN PAM
aauaucaaacaguaaaagcu

SEQ ID NO: 25364 - RNA, 20 nt, Artificial Sequence
  spacer sequence TTCN PAM
ugugucuuacauauucaugu

SEQ ID NO: 25365 - RNA, 20 nt, Artificial Sequence
  spacer sequence TTCN PAM
ugucauaccacagggucaag

SEQ ID NO: 25366 - RNA, 20 nt, Artificial Sequence
  spacer sequence TTCN PAM
ggcugaaagguauuuuuuuu

SEQ ID NO: 25367 - RNA, 20 nt, Artificial Sequence
  spacer sequence TTCN PAM
agguucaggcugaaagguau

SEQ ID NO: 25368 - RNA, 20 nt, Artificial Sequence
  spacer sequence TTCN PAM
cuuuaucuguuuaggguauu

SEQ ID NO: 25369 - RNA, 20 nt, Artificial Sequence
  spacer sequence TTCN PAM
uaaauagcuauauuucugag

SEQ ID NO: 25370 - RNA, 20 nt, Artificial Sequence
  spacer sequence TTCN PAM
gagauuuaacucagaaaauu

SEQ ID NO: 25371 - RNA, 20 nt, Artificial Sequence
  spacer sequence TTCN PAM
gaguuaaaucucagaaauau

SEQ ID NO: 25372 - RNA, 20 nt, Artificial Sequence
  spacer sequence TTCN PAM
uuugcuagcuguacuuucaa

SEQ ID NO: 25373 - RNA, 20 nt, Artificial Sequence
  spacer sequence TTCN PAM
aaaaugguuucucguuuaaa

SEQ ID NO: 25374 - RNA, 20 nt, Artificial Sequence
  spacer sequence TTCN PAM
cguuuaaacaacuucuaguu

SEQ ID NO: 25375 - RNA, 20 nt, Artificial Sequence
  spacer sequence TTCN PAM
aguucaacuaaaaagugauu

SEQ ID NO: 25376 - RNA, 20 nt, Artificial Sequence
  spacer sequence TTCN PAM
acuaaaaagugauuauaccc

SEQ ID NO: 25377 - RNA, 20 nt, Artificial Sequence
  spacer sequence TTCN PAM
uauuuaaauuacaggcccau

SEQ ID NO: 25378 - RNA, 20 nt, Artificial Sequence
  spacer sequence TTCN PAM
uuucauccuuggcaaaaauu

SEQ ID NO: 25379 - RNA, 20 nt, Artificial Sequence
  spacer sequence TTCN PAM
uccuuggcaaaaauuaaaaa

SEQ ID NO: 25380 - RNA, 20 nt, Artificial Sequence
  spacer sequence TTCN PAM
uagauagagaugcuuuuaca

SEQ ID NO: 25381 - RNA, 20 nt, Artificial Sequence
  spacer sequence TTCN PAM
aagcucuguaagcauucauu

SEQ ID NO: 25382 - RNA, 20 nt, Artificial Sequence
  spacer sequence TTCN PAM
uuagcuuaguuuccucccgu

SEQ ID NO: 25383 - RNA, 20 nt, Artificial Sequence
  spacer sequence TTCN PAM
ucccguuagcuugcaauaaa

SEQ ID NO: 25384 - RNA, 20 nt, Artificial Sequence
  spacer sequence TTCN PAM
cccucaaagugcuuuacagg

SEQ ID NO: 25385 - RNA, 20 nt, Artificial Sequence
  spacer sequence TTCN PAM
gcuuaauaaacuagauuucu

SEQ ID NO: 25386 - RNA, 20 nt, Artificial Sequence
  spacer sequence TTCN PAM
guuuacaaucaaagggaaaa

SEQ ID NO: 25387 - RNA, 20 nt, Artificial Sequence
  spacer sequence TTCN PAM
cuuugauuguaaacagaaau

SEQ ID NO: 25388 - RNA, 20 nt, Artificial Sequence
  spacer sequence TTCN PAM
aauuuucccuuugauuguaa

SEQ ID NO: 25389 - RNA, 20 nt, Artificial Sequence
  spacer sequence TTCN PAM
ccuugcaauaaguaaaagag

SEQ ID NO: 25390 - RNA, 20 nt, Artificial Sequence
  spacer sequence TTCN PAM
cuuagccaauuaaaaauuuc

SEQ ID NO: 25391 - RNA, 20 nt, Artificial Sequence
  spacer sequence TTCN PAM
agguccuaggcaaugaaaua

SEQ ID NO: 25392 - RNA, 20 nt, Artificial Sequence
  spacer sequence TTCN PAM
uugccuaggaccuugaaauu

SEQ ID NO: 25393 - RNA, 20 nt, Artificial Sequence
  spacer sequence TTCN PAM
ugucuguuuguuuuacuaau

SEQ ID NO: 25394 - RNA, 20 nt, Artificial Sequence
  spacer sequence TTCN PAM
aauuaguaaaacaaacagac

SEQ ID NO: 25395 - RNA, 20 nt, Artificial Sequence
  spacer sequence TTCN PAM
uuucaaauuaguaaaacaaa

SEQ ID NO: 25396 - RNA, 20 nt, Artificial Sequence
  spacer sequence TTCN PAM
aaauuuuuacccccucaauu

SEQ ID NO: 25397 - RNA, 20 nt, Artificial Sequence
  spacer sequence TTCN PAM
ugcaaaaggaaacuugguuu

SEQ ID NO: 25398 - RNA, 20 nt, Artificial Sequence
  spacer sequence TTCN PAM
uuuugcaugaauaaauugag

SEQ ID NO: 25399 - RNA, 20 nt, Artificial Sequence
  spacer sequence TTCN PAM
gauauuacagauuagacacc

SEQ ID NO: 25400 - RNA, 20 nt, Artificial Sequence
  spacer sequence TTCN PAM
auuuguguuuauaagaacau

SEQ ID NO: 25401 - RNA, 20 nt, Artificial Sequence
  spacer sequence TTCN PAM
uauaaacacaaauggaaaua

SEQ ID NO: 25402 - RNA, 20 nt, Artificial Sequence
  spacer sequence TTCN PAM
agaggcucccuuaccuccag

SEQ ID NO: 25403 - RNA, 20 nt, Artificial Sequence
  spacer sequence TTCN PAM
auuccaaccugagugggaac

SEQ ID NO: 25404 - RNA, 20 nt, Artificial Sequence
  spacer sequence TTCN PAM
aaccugagugggaacuguaa

SEQ ID NO: 25405 - RNA, 20 nt, Artificial Sequence
  spacer sequence TTCN PAM
cacucagguuggaauagaau

SEQ ID NO: 25406 - RNA, 20 nt, Artificial Sequence
  spacer sequence TTCN PAM
aauguccuggaggccuuagg

SEQ ID NO: 25407 - RNA, 20 nt, Artificial Sequence
  spacer sequence TTCN PAM
ugggcucuggcuuuagggca

SEQ ID NO: 25408 - RNA, 20 nt, Artificial Sequence
  spacer sequence TTCN PAM
guagagauuaccuaucuugg

SEQ ID NO: 25409 - RNA, 20 nt, Artificial Sequence
  spacer sequence TTCN PAM
ucuguagagauuaccuaucu

SEQ ID NO: 25410 - RNA, 20 nt, Artificial Sequence
  spacer sequence TTCN PAM
gagucuauagguaucaucua

SEQ ID NO: 25411 - RNA, 20 nt, Artificial Sequence
  spacer sequence TTCN PAM
uauaaaaccccacaccguuu

SEQ ID NO: 25412 - RNA, 20 nt, Artificial Sequence
  spacer sequence TTCN PAM
aauugaccuuccccaucuca

SEQ ID NO: 25413 - RNA, 20 nt, Artificial Sequence
  spacer sequence TTCN PAM
ccaucucaugauaugcuguu

SEQ ID NO: 25414 - RNA, 20 nt, Artificial Sequence
  spacer sequence TTCN PAM
cugaaaacuaaugcuuaguu

SEQ ID NO: 25415 - RNA, 20 nt, Artificial Sequence
  spacer sequence TTCN PAM
gggaacagcauaucaugaga

SEQ ID NO: 25416 - RNA, 20 nt, Artificial Sequence
  spacer sequence TTCN PAM
acuaagcauuaguuuucagg

SEQ ID NO: 25417 - RNA, 20 nt, Artificial Sequence
  spacer sequence TTCN PAM
auuuugacuuuaccauccag

SEQ ID NO: 25418 - RNA, 20 nt, Artificial Sequence
  spacer sequence TTCN PAM
caugaggaacaucugaaaug

SEQ ID NO: 25419 - RNA, 20 nt, Artificial Sequence
  spacer sequence TTCN PAM
ucaugagaacucuggauggu

SEQ ID NO: 25420 - RNA, 20 nt, Artificial Sequence
  spacer sequence TTCN PAM
gauguuccucaugagaacuc

SEQ ID NO: 25421 - RNA, 20 nt, Artificial Sequence
  spacer sequence TTCN PAM
ggagauuucuuugaagcagu

SEQ ID NO: 25422 - RNA, 20 nt, Artificial Sequence
  spacer sequence TTCN PAM
uugaagcagugcagaauaaa

SEQ ID NO: 25423 - RNA, 20 nt, Artificial Sequence
  spacer sequence TTCN PAM
aagaaaucuccagaagccug

SEQ ID NO: 25424 - RNA, 20 nt, Artificial Sequence
  spacer sequence TTCN PAM
gcacugcuucaaagaaaucu

SEQ ID NO: 25425 - RNA, 20 nt, Artificial Sequence
  spacer sequence TTCN PAM
uuuuauucugcacugcuuca

SEQ ID NO: 25426 - RNA, 20 nt, Artificial Sequence
  spacer sequence TTCN PAM
aucuuccuuuuauucugcac

SEQ ID NO: 25427 - RNA, 20 nt, Artificial Sequence
  spacer sequence TTCN PAM
uaauguguugaagcuuucug

SEQ ID NO: 25428 - RNA, 20 nt, Artificial Sequence
  spacer sequence TTCN PAM
agucaugcccuaugcuaucu

SEQ ID NO: 25429 - RNA, 20 nt, Artificial Sequence
  spacer sequence TTCN PAM
uauuaucauaauuaccuaua

SEQ ID NO: 25430 - RNA, 20 nt, Artificial Sequence
  spacer sequence TTCN PAM
agaccagccuggccaacagg

SEQ ID NO: 25431 - RNA, 20 nt, Artificial Sequence
  spacer sequence TTCN PAM
cccuguuggccaggcugguc

SEQ ID NO: 25432 - RNA, 20 nt, Artificial Sequence
  spacer sequence TTCN PAM
uugaaacauacuuucaucuc

SEQ ID NO: 25433 - RNA, 20 nt, Artificial Sequence
  spacer sequence TTCN PAM
augaaaaaauauaugugugu

SEQ ID NO: 25434 - RNA, 20 nt, Artificial Sequence
  spacer sequence TTCN PAM
ucucuuuucacauugauuuu

SEQ ID NO: 25435 - RNA, 20 nt, Artificial Sequence
  spacer sequence TTCN PAM
cauugauuuuggcuuguuug

SEQ ID NO: 25436 - RNA, 20 nt, Artificial Sequence
  spacer sequence TTCN PAM
guuguuuuucuucuaacuga

SEQ ID NO: 25437 - RNA, 20 nt, Artificial Sequence
  spacer sequence TTCN PAM
ucuaacugauaagaaugggg

SEQ ID NO: 25438 - RNA, 20 nt, Artificial Sequence
  spacer sequence TTCN PAM
aacugauaagaaugggguag

SEQ ID NO: 25439 - RNA, 20 nt, Artificial Sequence
  spacer sequence TTCN PAM
uaucaguuagaagaaaaaca

SEQ ID NO: 25440 - RNA, 20 nt, Artificial Sequence
  spacer sequence TTCN PAM
aaggccucuaaaccagucau

SEQ ID NO: 25441 - RNA, 20 nt, Artificial Sequence
  spacer sequence TTCN PAM
aagcuuagcucugaccaaau

SEQ ID NO: 25442 - RNA, 20 nt, Artificial Sequence
  spacer sequence TTCN PAM
cuugcaggaucagaccuuaa

SEQ ID NO: 25443 - RNA, 20 nt, Artificial Sequence
  spacer sequence TTCN PAM
cucaaacaccaaaauaaccu

SEQ ID NO: 25444 - RNA, 20 nt, Artificial Sequence
  spacer sequence TTCN PAM
gguuauuuugguguuugaga

SEQ ID NO: 25445 - RNA, 20 nt, Artificial Sequence
  spacer sequence TTCN PAM
ugagugcauauuuuuaaaug

SEQ ID NO: 25446 - RNA, 20 nt, Artificial Sequence
  spacer sequence TTCN PAM
cauaaauaagaguaggaggc

SEQ ID NO: 25447 - RNA, 20 nt, Artificial Sequence
  spacer sequence TTCN PAM
ucgcauaaauaagaguagga

SEQ ID NO: 25448 - RNA, 20 nt, Artificial Sequence
  spacer sequence TTCN PAM
aaguuaauuuuggucuuuuu

SEQ ID NO: 25449 - RNA, 20 nt, Artificial Sequence
  spacer sequence TTCN PAM
accauuaaaaagaccaaaau

SEQ ID NO: 25450 - RNA, 20 nt, Artificial Sequence
  spacer sequence TTCN PAM
guucaaccauuaaaaagacc

SEQ ID NO: 25451 - RNA, 20 nt, Artificial Sequence
  spacer sequence TTCN PAM
gccuccagggcuucuguuca

SEQ ID NO: 25452 - RNA, 20 nt, Artificial Sequence
  spacer sequence TTCN PAM
ccuucaguuuaaaagcgcua

SEQ ID NO: 25453 - RNA, 20 nt, Artificial Sequence
  spacer sequence TTCN PAM
guuuaaaagcgcuaauuucu

SEQ ID NO: 25454 - RNA, 20 nt, Artificial Sequence
  spacer sequence TTCN PAM
gccuucugggugccuuuaua

SEQ ID NO: 25455 - RNA, 20 nt, Artificial Sequence
  spacer sequence TTCN PAM
gggugccuuuauaacaacuu

SEQ ID NO: 25456 - RNA, 20 nt, Artificial Sequence
  spacer sequence TTCN PAM
agugagaggggaggaaagga

SEQ ID NO: 25457 - RNA, 20 nt, Artificial Sequence
  spacer sequence TTCN PAM
uccccucucacucgaaaguu

SEQ ID NO: 25458 - RNA, 20 nt, Artificial Sequence
  spacer sequence TTCN PAM
ugcccaacuuugcaauguua

SEQ ID NO: 25459 - RNA, 20 nt, Artificial Sequence
  spacer sequence TTCN PAM
cauuccugcccaacuuugca

SEQ ID NO: 25460 - RNA, 20 nt, Artificial Sequence
  spacer sequence TTCN PAM
auugcuuuuuuuuauguuuu

SEQ ID NO: 25461 - RNA, 20 nt, Artificial Sequence
  spacer sequence TTCN PAM
gccacuuguucagugacuuc

SEQ ID NO: 25462 - RNA, 20 nt, Artificial Sequence
  spacer sequence TTCN PAM
gugacuucuuuucaucagga

SEQ ID NO: 25463 - RNA, 20 nt, Artificial Sequence
  spacer sequence TTCN PAM
uuucaucaggaagguugcuu

SEQ ID NO: 25464 - RNA, 20 nt, Artificial Sequence
  spacer sequence TTCN PAM
ucaggaagguugcuuuacau

SEQ ID NO: 25465 - RNA, 20 nt, Artificial Sequence
  spacer sequence TTCN PAM
ugaugaaaagaagucacuga

SEQ ID NO: 25466 - RNA, 20 nt, Artificial Sequence
  spacer sequence TTCN PAM
uggugcagcacauuuaaaua

SEQ ID NO: 25467 - RNA, 20 nt, Artificial Sequence
  spacer sequence TTCN PAM
gguuuuuuucaguugaaauu

SEQ ID NO: 25468 - RNA, 20 nt, Artificial Sequence
  spacer sequence TTCN PAM
guugaaauuaauauuugcua

SEQ ID NO: 25469 - RNA, 20 nt, Artificial Sequence
  spacer sequence TTCN PAM
acugaaaaaaaccagaaggc

SEQ ID NO: 25470 - RNA, 20 nt, Artificial Sequence
  spacer sequence TTCN PAM
uuuauuagcaaauauuaauu

SEQ ID NO: 25471 - RNA, 20 nt, Artificial Sequence
  spacer sequence TTCN PAM
augaccugacaguucuuuua

SEQ ID NO: 25472 - RNA, 20 nt, Artificial Sequence
  spacer sequence TTCN PAM
uugauguacccaaaagaaca

SEQ ID NO: 25473 - RNA, 20 nt, Artificial Sequence
  spacer sequence TTCN PAM
uuuggguacaucaaugaaug

SEQ ID NO: 25474 - RNA, 20 nt, Artificial Sequence
  spacer sequence TTCN PAM
guucuuuuggguacaucaau

SEQ ID NO: 25475 - RNA, 20 nt, Artificial Sequence
  spacer sequence TTCN PAM
uuucacaagcccuauaugcu

SEQ ID NO: 25476 - RNA, 20 nt, Artificial Sequence
  spacer sequence TTCN PAM
caagcccuauaugcuccugg

SEQ ID NO: 25477 - RNA, 20 nt, Artificial Sequence
  spacer sequence TTCN PAM
uauagccaacaccuuaaacu

SEQ ID NO: 25478 - RNA, 20 nt, Artificial Sequence
  spacer sequence TTCN PAM
cauggguuaugcugcaaucg

SEQ ID NO: 25479 - RNA, 20 nt, Artificial Sequence
  spacer sequence TTCN PAM
uccggagucuccccacuuua

SEQ ID NO: 25480 - RNA, 20 nt, Artificial Sequence
  spacer sequence TTCN PAM
uaucuauuucaggcauaaau

SEQ ID NO: 25481 - RNA, 20 nt, Artificial Sequence
  spacer sequence TTCN PAM
ggcauaaauggauucugaaa

SEQ ID NO: 25482 - RNA, 20 nt, Artificial Sequence
  spacer sequence TTCN PAM
gaaauuuuguggcuuaaaaa

SEQ ID NO: 25483 - RNA, 20 nt, Artificial Sequence
  spacer sequence TTCN PAM
gaauccauuuaugccugaaa

SEQ ID NO: 25484 - RNA, 20 nt, Artificial Sequence
  spacer sequence TTCN PAM
uuuuuuuaagccacaaaauu

SEQ ID NO: 25485 - RNA, 20 nt, Artificial Sequence
  spacer sequence TTCN PAM
gugaacgcagcagaaacugc

SEQ ID NO: 25486 - RNA, 20 nt, Artificial Sequence
  spacer sequence TTCN PAM
cggaacuuuuucuuuuuuuu

SEQ ID NO: 25487 - RNA, 20 nt, Artificial Sequence
  spacer sequence TTCN PAM
gcugcguucacggaacuuuu

SEQ ID NO: 25488 - RNA, 20 nt, Artificial Sequence
  spacer sequence TTCN PAM
acguugcaguuucugcugcg

SEQ ID NO: 25489 - RNA, 20 nt, Artificial Sequence
  spacer sequence TTCN PAM
guguggagaucuggaagcac

SEQ ID NO: 25490 - RNA, 20 nt, Artificial Sequence
  spacer sequence TTCN PAM
agaucuccacacugaaaugu

SEQ ID NO: 25491 - RNA, 20 nt, Artificial Sequence
  spacer sequence TTCN PAM
uaccucaggaagacccauac

SEQ ID NO: 25492 - RNA, 20 nt, Artificial Sequence
  spacer sequence TTCN PAM
ugagguaggaaugcaaaggc

SEQ ID NO: 25493 - RNA, 20 nt, Artificial Sequence
  spacer sequence TTCN PAM
auuauuguaugggucuuccu

SEQ ID NO: 25494 - RNA, 20 nt, Artificial Sequence
  spacer sequence TTCN PAM
aggauuaccaagucaauuac

SEQ ID NO: 25495 - RNA, 20 nt, Artificial Sequence
  spacer sequence TTCN PAM
cccucucaguaauugacuug

SEQ ID NO: 25496 - RNA, 20 nt, Artificial Sequence
  spacer sequence TTCN PAM
uuuuuauuuuucucccucuc

SEQ ID NO: 25497 - RNA, 20 nt, Artificial Sequence
  spacer sequence TTCN PAM
auucaaacagcucccaggga

SEQ ID NO: 25498 - RNA, 20 nt, Artificial Sequence
  spacer sequence TTCN PAM
aacagcucccagggaguuaa

SEQ ID NO: 25499 - RNA, 20 nt, Artificial Sequence
  spacer sequence TTCN PAM
cucuauauggugaacagugu

SEQ ID NO: 25500 - RNA, 20 nt, Artificial Sequence
  spacer sequence TTCN PAM
ccauauagagagaauuuuaa

SEQ ID NO: 25501 - RNA, 20 nt, Artificial Sequence
  spacer sequence TTCN PAM
uuuggggucuacaccugcug

SEQ ID NO: 25502 - RNA, 20 nt, Artificial Sequence
  spacer sequence TTCN PAM
guacaugccugccucuugca

SEQ ID NO: 25503 - RNA, 20 nt, Artificial Sequence
  spacer sequence TTCN PAM
aauuucgguacaugccugcc

SEQ ID NO: 25504 - RNA, 20 nt, Artificial Sequence
  spacer sequence TTCN PAM
caggcuauuguuuaacauuc

SEQ ID NO: 25505 - RNA, 20 nt, Artificial Sequence
  spacer sequence TTCN PAM
acauaugugagauacagaau

SEQ ID NO: 25506 - RNA, 20 nt, Artificial Sequence
  spacer sequence TTCN PAM
guaucucacauauguagaau

SEQ ID NO: 25507 - RNA, 20 nt, Artificial Sequence
  spacer sequence TTCN PAM
uucuguaucucacauaugua

SEQ ID NO: 25508 - RNA, 20 nt, Artificial Sequence
  spacer sequence TTCN PAM
uucauucuguaucucacaua

SEQ ID NO: 25509 - RNA, 20 nt, Artificial Sequence
  spacer sequence TTCN PAM
cauucuuucauucuguaucu

SEQ ID NO: 25510 - RNA, 20 nt, Artificial Sequence
  spacer sequence TTCN PAM
caaggcaaucucaagcuuua

SEQ ID NO: 25511 - RNA, 20 nt, Artificial Sequence
  spacer sequence TTCN PAM
gacagauucucuaacugaca

SEQ ID NO: 25512 - RNA, 20 nt, Artificial Sequence
  spacer sequence TTCN PAM
cuaacugacaauuaauauua

SEQ ID NO: 25513 - RNA, 20 nt, Artificial Sequence
  spacer sequence TTCN PAM
caauguggcauuaucacacg

SEQ ID NO: 25514 - RNA, 20 nt, Artificial Sequence
  spacer sequence TTCN PAM
cccugagccaaguaaucccu

SEQ ID NO: 25515 - RNA, 20 nt, Artificial Sequence
  spacer sequence TTCN PAM
auuucucccugagccaagua

SEQ ID NO: 25516 - RNA, 20 nt, Artificial Sequence
  spacer sequence TTCN PAM
ucuuuuguuuggacgcagcu

SEQ ID NO: 25517 - RNA, 20 nt, Artificial Sequence
  spacer sequence TTCN PAM
cccuuguucuuuauuugugg

SEQ ID NO: 25518 - RNA, 20 nt, Artificial Sequence
  spacer sequence TTCN PAM
uuauuuguggucggcaacau

SEQ ID NO: 25519 - RNA, 20 nt, Artificial Sequence
  spacer sequence TTCN PAM
ccuggagauguugccgacca

SEQ ID NO: 25520 - RNA, 20 nt, Artificial Sequence
  spacer sequence TTCN PAM
uuuccccuggagauguugcc

SEQ ID NO: 25521 - RNA, 20 nt, Artificial Sequence
  spacer sequence TTCN PAM
ggaugcuuuagaauagguaa

SEQ ID NO: 25522 - RNA, 20 nt, Artificial Sequence
  spacer sequence TTCN PAM
aaagcauccagaaauagacc

SEQ ID NO: 25523 - RNA, 20 nt, Artificial Sequence
  spacer sequence TTCN PAM
auaugcccuuuuaccuauuc

SEQ ID NO: 25524 - RNA, 20 nt, Artificial Sequence
  spacer sequence TTCN PAM
gguaccucaagaaugccucg

SEQ ID NO: 25525 - RNA, 20 nt, Artificial Sequence
  spacer sequence TTCN PAM
caaguuaccugcagcagcaa

SEQ ID NO: 25526 - RNA, 20 nt, Artificial Sequence
  spacer sequence TTCN PAM
acuuuugcucugaugaugag

SEQ ID NO: 25527 - RNA, 20 nt, Artificial Sequence
  spacer sequence TTCN PAM
cacucaucaucagagcaaaa

SEQ ID NO: 25528 - RNA, 20 nt, Artificial Sequence
  spacer sequence TTCN PAM
aacucaugaaaaaacacuuc

SEQ ID NO: 25529 - RNA, 20 nt, Artificial Sequence
  spacer sequence TTCN PAM
ugaguuggaaugucuuggug

SEQ ID NO: 25530 - RNA, 20 nt, Artificial Sequence
  spacer sequence TTCN PAM
cauacagcauggaucaugug

SEQ ID NO: 25531 - RNA, 20 nt, Artificial Sequence
  spacer sequence TTCN PAM
gcgcgcaggggcggccucgg

SEQ ID NO: 25532 - RNA, 20 nt, Artificial Sequence
  spacer sequence TTCN PAM
ugcggacccggcccacggcg

SEQ ID NO: 25533 - RNA, 20 nt, Artificial Sequence
  spacer sequence TTCN PAM
cgccuccgcgccuccggggg

SEQ ID NO: 25534 - RNA, 20 nt, Artificial Sequence
  spacer sequence TTCN PAM
ugaucaugguauuuuuauuc

SEQ ID NO: 25535 - RNA, 20 nt, Artificial Sequence
  spacer sequence TTCN PAM
acgcauaugcaagcaacuac

SEQ ID NO: 25536 - RNA, 20 nt, Artificial Sequence
  spacer sequence TTCN PAM
agauauauuccacgcauaug

SEQ ID NO: 25537 - RNA, 20 nt, Artificial Sequence
  spacer sequence TTCN PAM
uuugugacguuccagauaua

SEQ ID NO: 25538 - RNA, 20 nt, Artificial Sequence
  spacer sequence TTCN PAM
aacuugguacauggcucuag

SEQ ID NO: 25539 - RNA, 20 nt, Artificial Sequence
  spacer sequence TTCN PAM
aauuaccagagccuugauuc

SEQ ID NO: 25540 - RNA, 20 nt, Artificial Sequence
  spacer sequence TTCN PAM
guggcauagccacagaguug

SEQ ID NO: 25541 - RNA, 20 nt, Artificial Sequence
  spacer sequence TTCN PAM
uuaugaucaggagagacucu

SEQ ID NO: 25542 - RNA, 20 nt, Artificial Sequence
  spacer sequence TTCN PAM
auuuggcaugcagaucacgu

SEQ ID NO: 25543 - RNA, 20 nt, Artificial Sequence
  spacer sequence TTCN PAM
ccugccugcuuggagcaaag

SEQ ID NO: 25544 - RNA, 20 nt, Artificial Sequence
  spacer sequence TTCN PAM
uuaacuacccccuacaccac

SEQ ID NO: 25545 - RNA, 20 nt, Artificial Sequence
  spacer sequence TTCN PAM
cuccccucaaaagagaagau

SEQ ID NO: 25546 - RNA, 20 nt, Artificial Sequence
  spacer sequence TTCN PAM
cuuuugaggggagagaaggg

SEQ ID NO: 25547 - RNA, 20 nt, Artificial Sequence
  spacer sequence TTCN PAM
ucaaggagccaauggcgcca

SEQ ID NO: 25548 - RNA, 20 nt, Artificial Sequence
  spacer sequence TTCN PAM
caguggggaagcccuuugca

SEQ ID NO: 25549 - RNA, 20 nt, Artificial Sequence
  spacer sequence TTCN PAM
ccacugggaagacacacaca

SEQ ID NO: 25550 - RNA, 20 nt, Artificial Sequence
  spacer sequence TTCN PAM
uggauccccaucgagagugc

SEQ ID NO: 25551 - RNA, 20 nt, Artificial Sequence
  spacer sequence TTCN PAM
cagccuugccuugggcuccc

SEQ ID NO: 25552 - RNA, 20 nt, Artificial Sequence
  spacer sequence TTCN PAM
caccaaccucugucucccgu

SEQ ID NO: 25553 - RNA, 20 nt, Artificial Sequence
  spacer sequence TTCN PAM
caauuaauucucaccaaccu

SEQ ID NO: 25554 - RNA, 20 nt, Artificial Sequence
  spacer sequence TTCN PAM
uuugugccucucaaugcacu

SEQ ID NO: 25555 - RNA, 20 nt, Artificial Sequence
  spacer sequence TTCN PAM
aaaauagcucuuaggauaug

SEQ ID NO: 25556 - RNA, 20 nt, Artificial Sequence
  spacer sequence TTCN PAM
gagcagccccauuuugcucc

SEQ ID NO: 25557 - RNA, 20 nt, Artificial Sequence
  spacer sequence TTCN PAM
cuucccuccagggcgggggu

SEQ ID NO: 25558 - RNA, 20 nt, Artificial Sequence
  spacer sequence TTCN PAM
cuccagggcgggggugagca

SEQ ID NO: 25559 - RNA, 20 nt, Artificial Sequence
  spacer sequence TTCN PAM
aaaggcugcugaugggaggg

SEQ ID NO: 25560 - RNA, 20 nt, Artificial Sequence
  spacer sequence TTCN PAM
gcugcccucccaucagcagc

SEQ ID NO: 25561 - RNA, 20 nt, Artificial Sequence
  spacer sequence TTCN PAM
ugagagaagguccccagacu

SEQ ID NO: 25562 - RNA, 20 nt, Artificial Sequence
  spacer sequence TTCN PAM
cucaagaacguggggucagc

SEQ ID NO: 25563 - RNA, 20 nt, Artificial Sequence
  spacer sequence TTCN PAM
cggcauaauuuccuucucac

SEQ ID NO: 25564 - RNA, 20 nt, Artificial Sequence
  spacer sequence TTCN PAM
uucucacuucacuguucucu

SEQ ID NO: 25565 - RNA, 20 nt, Artificial Sequence
  spacer sequence TTCN PAM
cacuucacuguucucuuccc

SEQ ID NO: 25566 - RNA, 20 nt, Artificial Sequence
  spacer sequence TTCN PAM
cuguucucuucccugucuga

SEQ ID NO: 25567 - RNA, 20 nt, Artificial Sequence
  spacer sequence TTCN PAM
cuucccugucugaaauggca

SEQ ID NO: 25568 - RNA, 20 nt, Artificial Sequence
  spacer sequence TTCN PAM
cugucugaaauggcagguga

SEQ ID NO: 25569 - RNA, 20 nt, Artificial Sequence
  spacer sequence TTCN PAM
gacagggaagagaacaguga

SEQ ID NO: 25570 - RNA, 20 nt, Artificial Sequence
  spacer sequence TTCN PAM
cacaccauuccuccucagca

SEQ ID NO: 25571 - RNA, 20 nt, Artificial Sequence
  spacer sequence TTCN PAM
uccucagcacaccugccaug

SEQ ID NO: 25572 - RNA, 20 nt, Artificial Sequence
  spacer sequence TTCN PAM
ugcgucccucuccaucugac

SEQ ID NO: 25573 - RNA, 20 nt, Artificial Sequence
  spacer sequence TTCN PAM
cacuucaugcgucccucucc

SEQ ID NO: 25574 - RNA, 20 nt, Artificial Sequence
  spacer sequence TTCN PAM
ucucacuucaugcgucccuc

SEQ ID NO: 25575 - RNA, 20 nt, Artificial Sequence
  spacer sequence TTCN PAM
uuaggccgccgccaccuccg

SEQ ID NO: 25576 - RNA, 20 nt, Artificial Sequence
  spacer sequence TTCN PAM
caguaagacuuucucaauga

SEQ ID NO: 25577 - RNA, 20 nt, Artificial Sequence
  spacer sequence TTCN PAM
caaugaaggaagcagugcau

SEQ ID NO: 25578 - RNA, 20 nt, Artificial Sequence
  spacer sequence TTCN PAM
uugagaaagucuuacuguga

SEQ ID NO: 25579 - RNA, 20 nt, Artificial Sequence
  spacer sequence TTCN PAM
uucauugagaaagucuuacu

SEQ ID NO: 25580 - RNA, 20 nt, Artificial Sequence
  spacer sequence TTCN PAM
ggugcaagcacucccggacu

SEQ ID NO: 25581 - RNA, 20 nt, Artificial Sequence
  spacer sequence TTCN PAM
cugacuccuugccucucucu

SEQ ID NO: 25582 - RNA, 20 nt, Artificial Sequence
  spacer sequence TTCN PAM
gucaucacaucuguuucucu

SEQ ID NO: 25583 - RNA, 20 nt, Artificial Sequence
  spacer sequence TTCN PAM
gagagucagagagagguaug

SEQ ID NO: 25584 - RNA, 20 nt, Artificial Sequence
  spacer sequence TTCN PAM
uaccucucucugacucucug

SEQ ID NO: 25585 - RNA, 20 nt, Artificial Sequence
  spacer sequence TTCN PAM
caucuucauaccucucucug

SEQ ID NO: 25586 - RNA, 20 nt, Artificial Sequence
  spacer sequence TTCN PAM
uuucagaagaaaaaaauaaa

SEQ ID NO: 25587 - RNA, 20 nt, Artificial Sequence
  spacer sequence TTCN PAM
gaagaaaaaaauaaauuuuu

SEQ ID NO: 25588 - RNA, 20 nt, Artificial Sequence
  spacer sequence TTCN PAM
gaaaagaaaauaaaacuuuu

SEQ ID NO: 25589 - RNA, 20 nt, Artificial Sequence
  spacer sequence TTCN PAM
ucugaaaagaaaauaaaacu

SEQ ID NO: 25590 - RNA, 20 nt, Artificial Sequence
  spacer sequence TTCN PAM
uugaccuaaaaauuuauuuu

SEQ ID NO: 25591 - RNA, 20 nt, Artificial Sequence
  spacer sequence TTCN PAM
accauaaaauccuaauauau

SEQ ID NO: 25592 - RNA, 20 nt, Artificial Sequence
  spacer sequence TTCN PAM
cuuuauaccaaugcagcugu

SEQ ID NO: 25593 - RNA, 20 nt, Artificial Sequence
  spacer sequence TTCN PAM
guaaauccuucaaaaaccgg

SEQ ID NO: 25594 - RNA, 20 nt, Artificial Sequence
  spacer sequence TTCN PAM
aaaaccggcauuuuuaaaca

SEQ ID NO: 25595 - RNA, 20 nt, Artificial Sequence
  spacer sequence TTCN PAM
guuuaaaaaugccgguuuuu

SEQ ID NO: 25596 - RNA, 20 nt, Artificial Sequence
  spacer sequence TTCN PAM
uuugccaaaguacauccaag

SEQ ID NO: 25597 - RNA, 20 nt, Artificial Sequence
  spacer sequence TTCN PAM
uauuuauaacugaggauucc

SEQ ID NO: 25598 - RNA, 20 nt, Artificial Sequence
  spacer sequence TTCN PAM
uuuucuuugaaaagcucccu

SEQ ID NO: 25599 - RNA, 20 nt, Artificial Sequence
  spacer sequence TTCN PAM
uugaaaagcucccuggaaga

SEQ ID NO: 25600 - RNA, 20 nt, Artificial Sequence
  spacer sequence TTCN PAM
aagaaaaggaauccucaguu

SEQ ID NO: 25601 - RNA, 20 nt, Artificial Sequence
  spacer sequence TTCN PAM
agggagcuuuucaaagaaaa

SEQ ID NO: 25602 - RNA, 20 nt, Artificial Sequence
  spacer sequence TTCN PAM
ggaugacuuggaagcuaaau

SEQ ID NO: 25603 - RNA, 20 nt, Artificial Sequence
  spacer sequence TTCN PAM
aagucauccagaaaucuucc

SEQ ID NO: 25604 - RNA, 20 nt, Artificial Sequence
  spacer sequence TTCN PAM
guggcucaagagcagacaaa

SEQ ID NO: 25605 - RNA, 20 nt, Artificial Sequence
  spacer sequence TTCN PAM
uccacaggcagagaaccaaa

SEQ ID NO: 25606 - RNA, 20 nt, Artificial Sequence
  spacer sequence TTCN PAM
acaggcagagaaccaaagug

SEQ ID NO: 25607 - RNA, 20 nt, Artificial Sequence
  spacer sequence TTCN PAM
cugccuguggaagaaucuug

SEQ ID NO: 25608 - RNA, 20 nt, Artificial Sequence
  spacer sequence TTCN PAM
ucucagcaaacucuuugacu

SEQ ID NO: 25609 - RNA, 20 nt, Artificial Sequence
  spacer sequence TTCN PAM
gacacauuccucugccaaca

SEQ ID NO: 25610 - RNA, 20 nt, Artificial Sequence
  spacer sequence TTCN PAM
ucugccaacagcaaauaagu

SEQ ID NO: 25611 - RNA, 20 nt, Artificial Sequence
  spacer sequence TTCN PAM
cacuuauuugcuguuggcag

SEQ ID NO: 25612 - RNA, 20 nt, Artificial Sequence
  spacer sequence TTCN PAM
aaugagcaguggcaucucuu

SEQ ID NO: 25613 - RNA, 20 nt, Artificial Sequence
  spacer sequence TTCN PAM
cauuuguaaaagggaguguc

SEQ ID NO: 25614 - RNA, 20 nt, Artificial Sequence
  spacer sequence TTCN PAM
gucugacacucccuuuuaca

SEQ ID NO: 25615 - RNA, 20 nt, Artificial Sequence
  spacer sequence TTCN PAM
ugcuuuuuggguuaaaacag

SEQ ID NO: 25616 - RNA, 20 nt, Artificial Sequence
  spacer sequence TTCN PAM
ggccaacugcagccaagugg

SEQ ID NO: 25617 - RNA, 20 nt, Artificial Sequence
  spacer sequence TTCN PAM
uagcuaugcauaggagacug

SEQ ID NO: 25618 - RNA, 20 nt, Artificial Sequence
  spacer sequence TTCN PAM
ggguuugugacuuuuaaguu

SEQ ID NO: 25619 - RNA, 20 nt, Artificial Sequence
  spacer sequence TTCN PAM
ucuuuaaacauuugcaagag

SEQ ID NO: 25620 - RNA, 20 nt, Artificial Sequence
  spacer sequence TTCN PAM
ucaugaacacuucaauucua

SEQ ID NO: 25621 - RNA, 20 nt, Artificial Sequence
  spacer sequence TTCN PAM
ugaugaaugugaucugcagg

SEQ ID NO: 25622 - RNA, 20 nt, Artificial Sequence
  spacer sequence TTCN PAM
auucuaucagaccuucaugg

SEQ ID NO: 25623 - RNA, 20 nt, Artificial Sequence
  spacer sequence TTCN PAM
aucagaccuucauggcccuu

SEQ ID NO: 25624 - RNA, 20 nt, Artificial Sequence
  spacer sequence TTCN PAM
uacacgcaugcuucuuggca

SEQ ID NO: 25625 - RNA, 20 nt, Artificial Sequence
  spacer sequence TTCN PAM
uggcauaaaauaggguuaca

SEQ ID NO: 25626 - RNA, 20 nt, Artificial Sequence
  spacer sequence TTCN PAM
auagguuagguauauuagac

SEQ ID NO: 25627 - RNA, 20 nt, Artificial Sequence
  spacer sequence TTCN PAM
cuggugugaagcagcaguug

SEQ ID NO: 25628 - RNA, 20 nt, Artificial Sequence
  spacer sequence TTCN PAM
caccagugaaaugagucagc

SEQ ID NO: 25629 - RNA, 20 nt, Artificial Sequence
  spacer sequence TTCN PAM
uccugcuuggaaugcccuuu

SEQ ID NO: 25630 - RNA, 20 nt, Artificial Sequence
  spacer sequence TTCN PAM
aagcaggaggaacagcuggu

SEQ ID NO: 25631 - RNA, 20 nt, Artificial Sequence
  spacer sequence TTCN PAM
ucaggaccucacuuggcucc

SEQ ID NO: 25632 - RNA, 20 nt, Artificial Sequence
  spacer sequence TTCN PAM
acagaggugacacuccagaa

SEQ ID NO: 25633 - RNA, 20 nt, Artificial Sequence
  spacer sequence TTCN PAM
aagaucuuacauuccacaga

SEQ ID NO: 25634 - RNA, 20 nt, Artificial Sequence
  spacer sequence TTCN PAM
uugcuauucuccagaaguaa

SEQ ID NO: 25635 - RNA, 20 nt, Artificial Sequence
  spacer sequence TTCN PAM
ccagaaguaagaaaguguuc

SEQ ID NO: 25636 - RNA, 20 nt, Artificial Sequence
  spacer sequence TTCN PAM
ggagaauagcaaugaaccag

SEQ ID NO: 25637 - RNA, 20 nt, Artificial Sequence
  spacer sequence TTCN PAM
uacuucuggagaauagcaau

SEQ ID NO: 25638 - RNA, 20 nt, Artificial Sequence
  spacer sequence TTCN PAM
ugcagggaguaggagcauaa

SEQ ID NO: 25639 - RNA, 20 nt, Artificial Sequence
  spacer sequence TTCN PAM
caucgaagaaaaacccagga

SEQ ID NO: 25640 - RNA, 20 nt, Artificial Sequence
  spacer sequence TTCN PAM
augggaagcuuccaucuggu

SEQ ID NO: 25641 - RNA, 20 nt, Artificial Sequence
  spacer sequence TTCN PAM
ucgaugggaagcuuccaucu

SEQ ID NO: 25642 - RNA, 20 nt, Artificial Sequence
  spacer sequence TTCN PAM
cugcugaguucuacaaaaca

SEQ ID NO: 25643 - RNA, 20 nt, Artificial Sequence
  spacer sequence TTCN PAM
acaaaacauuuaaagaacua

SEQ ID NO: 25644 - RNA, 20 nt, Artificial Sequence
  spacer sequence TTCN PAM
uuaaauguuuuguagaacuc

SEQ ID NO: 25645 - RNA, 20 nt, Artificial Sequence
  spacer sequence TTCN PAM
gaaaaauugaagagaaggga

SEQ ID NO: 25646 - RNA, 20 nt, Artificial Sequence
  spacer sequence TTCN PAM
gaagaguuugaguaaaauug

SEQ ID NO: 25647 - RNA, 20 nt, Artificial Sequence
  spacer sequence TTCN PAM
cuugccuaauugcucuggcc

SEQ ID NO: 25648 - RNA, 20 nt, Artificial Sequence
  spacer sequence TTCN PAM
uuuuuucucuugccuaauug

SEQ ID NO: 25649 - RNA, 20 nt, Artificial Sequence
  spacer sequence TTCN PAM
aauuuggaugcccuuucuuu

SEQ ID NO: 25650 - RNA, 20 nt, Artificial Sequence
  spacer sequence TTCN PAM
uuccaauuuggaugcccuuu

SEQ ID NO: 25651 - RNA, 20 nt, Artificial Sequence
  spacer sequence TTCN PAM
uucuuuccaauuuggaugcc

SEQ ID NO: 25652 - RNA, 20 nt, Artificial Sequence
  spacer sequence TTCN PAM
cagacaacacgaucuuauac

SEQ ID NO: 25653 - RNA, 20 nt, Artificial Sequence
  spacer sequence TTCN PAM
aaguauaagaucguguuguc

SEQ ID NO: 25654 - RNA, 20 nt, Artificial Sequence
  spacer sequence TTCN PAM
aacaauuuuuugguggaguc

SEQ ID NO: 25655 - RNA, 20 nt, Artificial Sequence
  spacer sequence TTCN PAM
guaaaguugcaggauauaaa

SEQ ID NO: 25656 - RNA, 20 nt, Artificial Sequence
  spacer sequence TTCN PAM
ucucauuuuguaauuggauu

SEQ ID NO: 25657 - RNA, 20 nt, Artificial Sequence
  spacer sequence TTCN PAM
ucuucucauuuuguaauugg

SEQ ID NO: 25658 - RNA, 20 nt, Artificial Sequence
  spacer sequence TTCN PAM
caaaauaauauauacaaaug

SEQ ID NO: 25659 - RNA, 20 nt, Artificial Sequence
  spacer sequence TTCN PAM
uauaucuguuggccauuugu

SEQ ID NO: 25660 - RNA, 20 nt, Artificial Sequence
  spacer sequence TTCN PAM
cugauuaugaugaugaguga

SEQ ID NO: 25661 - RNA, 20 nt, Artificial Sequence
  spacer sequence TTCN PAM
cugucuuuuugauaaaagcc

SEQ ID NO: 25662 - RNA, 20 nt, Artificial Sequence
  spacer sequence TTCN PAM
gucaaugccuacacuucuga

SEQ ID NO: 25663 - RNA, 20 nt, Artificial Sequence
  spacer sequence TTCN PAM
gaauggugcccgcaccugau

SEQ ID NO: 25664 - RNA, 20 nt, Artificial Sequence
  spacer sequence TTCN PAM
gaaguguaggcauugacuga

SEQ ID NO: 25665 - RNA, 20 nt, Artificial Sequence
  spacer sequence TTCN PAM
ccaaaggguggccuagccau

SEQ ID NO: 25666 - RNA, 20 nt, Artificial Sequence
  spacer sequence TTCN PAM
ucuacuccccuguaaugcca

SEQ ID NO: 25667 - RNA, 20 nt, Artificial Sequence
  spacer sequence TTCN PAM
caaacaacucaaggcaaaag

SEQ ID NO: 25668 - RNA, 20 nt, Artificial Sequence
  spacer sequence TTCN PAM
cucuccauaauggugcuuuu

SEQ ID NO: 25669 - RNA, 20 nt, Artificial Sequence
  spacer sequence TTCN PAM
gaaugucacagcagaaauau

SEQ ID NO: 25670 - RNA, 20 nt, Artificial Sequence
  spacer sequence TTCN PAM
gaaguuugcaguugaacaau

SEQ ID NO: 25671 - RNA, 20 nt, Artificial Sequence
  spacer sequence TTCN PAM
gcugugacauucugaaguuu

SEQ ID NO: 25672 - RNA, 20 nt, Artificial Sequence
  spacer sequence TTCN PAM
aacauuucagacaaggcuau

SEQ ID NO: 25673 - RNA, 20 nt, Artificial Sequence
  spacer sequence TTCN PAM
gacaaggcuaugagaucauc

SEQ ID NO: 25674 - RNA, 20 nt, Artificial Sequence
  spacer sequence TTCN PAM
ucaaaaugcaauuugcaaau

SEQ ID NO: 25675 - RNA, 20 nt, Artificial Sequence
  spacer sequence TTCN PAM
aaaugcaauuugcaaauaaa

SEQ ID NO: 25676 - RNA, 20 nt, Artificial Sequence
  spacer sequence TTCN PAM
cccccgccccaaccaucugc

SEQ ID NO: 25677 - RNA, 20 nt, Artificial Sequence
  spacer sequence TTCN PAM
caaaauagaguaggagcuca

SEQ ID NO: 25678 - RNA, 20 nt, Artificial Sequence
  spacer sequence TTCN PAM
uaaagaaccaggucucugag

SEQ ID NO: 25679 - RNA, 20 nt, Artificial Sequence
  spacer sequence TTCN PAM
uuacgaaaagaggguuccca

SEQ ID NO: 25680 - RNA, 20 nt, Artificial Sequence
  spacer sequence TTCN PAM
aaaauaagacaauuuccuua

SEQ ID NO: 25681 - RNA, 20 nt, Artificial Sequence
  spacer sequence TTCN PAM
uuaacuaugcaaaugaauuc

SEQ ID NO: 25682 - RNA, 20 nt, Artificial Sequence
  spacer sequence TTCN PAM
uuugcauaguuaaggaaauu

SEQ ID NO: 25683 - RNA, 20 nt, Artificial Sequence
  spacer sequence TTCN PAM
uauuaauaauuccaugaaau

SEQ ID NO: 25684 - RNA, 20 nt, Artificial Sequence
  spacer sequence TTCN PAM
augaaaugugucuauaguaa

SEQ ID NO: 25685 - RNA, 20 nt, Artificial Sequence
  spacer sequence TTCN PAM
uggaauuauuaauaugaauu

SEQ ID NO: 25686 - RNA, 20 nt, Artificial Sequence
  spacer sequence TTCN PAM
cauucccucaucacuugcuc

SEQ ID NO: 25687 - RNA, 20 nt, Artificial Sequence
  spacer sequence TTCN PAM
cucaucacuugcucugaaau

SEQ ID NO: 25688 - RNA, 20 nt, Artificial Sequence
  spacer sequence TTCN PAM
gagcaagugaugagggaaug

SEQ ID NO: 25689 - RNA, 20 nt, Artificial Sequence
  spacer sequence TTCN PAM
gauaaauuucagagcaagug

SEQ ID NO: 25690 - RNA, 20 nt, Artificial Sequence
  spacer sequence TTCN PAM
ggaugccuccaagaaggucu

SEQ ID NO: 25691 - RNA, 20 nt, Artificial Sequence
  spacer sequence TTCN PAM
uggaggcauccagaaguuug

SEQ ID NO: 25692 - RNA, 20 nt, Artificial Sequence
  spacer sequence TTCN PAM
uugaaagaaaaacaaguuca

SEQ ID NO: 25693 - RNA, 20 nt, Artificial Sequence
  spacer sequence TTCN PAM
aagaacaaugauccuuaggu

SEQ ID NO: 25694 - RNA, 20 nt, Artificial Sequence
  spacer sequence TTCN PAM
uucaaagaacaaugauccuu

SEQ ID NO: 25695 - RNA, 20 nt, Artificial Sequence
  spacer sequence TTCN PAM
uuaaucuugcagacagcccc

SEQ ID NO: 25696 - RNA, 20 nt, Artificial Sequence
  spacer sequence TTCN PAM
cuaaucauugauuaacuuua

SEQ ID NO: 25697 - RNA, 20 nt, Artificial Sequence
  spacer sequence TTCN PAM
ccaugcaugauuacuugcac

SEQ ID NO: 25698 - RNA, 20 nt, Artificial Sequence
  spacer sequence TTCN PAM
uucuccaugcaugauuacuu

SEQ ID NO: 25699 - RNA, 20 nt, Artificial Sequence
  spacer sequence TTCN PAM
cuuuguccuuuucuuucucc

SEQ ID NO: 25700 - RNA, 20 nt, Artificial Sequence
  spacer sequence TTCN PAM
uuucucuuuguccuuuucuu

SEQ ID NO: 25701 - RNA, 20 nt, Artificial Sequence
  spacer sequence TTCN PAM
guaaccaagccugugugaua

SEQ ID NO: 25702 - RNA, 20 nt, Artificial Sequence
  spacer sequence TTCN PAM
uccuguguuucuguaaccaa

SEQ ID NO: 25703 - RNA, 20 nt, Artificial Sequence
  spacer sequence TTCN PAM
uccuccuguguuucuguaac

SEQ ID NO: 25704 - RNA, 20 nt, Artificial Sequence
  spacer sequence TTCN PAM
gauucuuccuccuguguuuc

SEQ ID NO: 25705 - RNA, 20 nt, Artificial Sequence
  spacer sequence TTCN PAM
uuucaaguccuaaccuccag

SEQ ID NO: 25706 - RNA, 20 nt, Artificial Sequence
  spacer sequence TTCN PAM
aguccuaaccuccagaaccu

SEQ ID NO: 25707 - RNA, 20 nt, Artificial Sequence
  spacer sequence TTCN PAM
ggagguuaggacuugaaaug

SEQ ID NO: 25708 - RNA, 20 nt, Artificial Sequence
  spacer sequence TTCN PAM
gagguucuggagguuaggac

SEQ ID NO: 25709 - RNA, 20 nt, Artificial Sequence
  spacer sequence TTCN PAM
aaauaaggucacauucugag

SEQ ID NO: 25710 - RNA, 20 nt, Artificial Sequence
  spacer sequence TTCN PAM
uauuaaauaauuacaucuac

SEQ ID NO: 25711 - RNA, 20 nt, Artificial Sequence
  spacer sequence TTCN PAM
aacucucugcuaguuucugg

SEQ ID NO: 25712 - RNA, 20 nt, Artificial Sequence
  spacer sequence TTCN PAM
cagaaggaaccagcccugcu

SEQ ID NO: 25713 - RNA, 20 nt, Artificial Sequence
  spacer sequence TTCN PAM
gagaaaaaaaaaaaucucuu

SEQ ID NO: 25714 - RNA, 20 nt, Artificial Sequence
  spacer sequence TTCN PAM
uucugagaaaaaaaaaaauc

SEQ ID NO: 25715 - RNA, 20 nt, Artificial Sequence
  spacer sequence TTCN PAM
agccuccagagcugugagac

SEQ ID NO: 25716 - RNA, 20 nt, Artificial Sequence
  spacer sequence TTCN PAM
uagcgcugccauaacaaagg

SEQ ID NO: 25717 - RNA, 20 nt, Artificial Sequence
  spacer sequence TTCN PAM
uuuccuagcgcugccauaac

SEQ ID NO: 25718 - RNA, 20 nt, Artificial Sequence
  spacer sequence TTCN PAM
ccuccucaucuuagagcagu

SEQ ID NO: 25719 - RNA, 20 nt, Artificial Sequence
  spacer sequence TTCN PAM
acagugcacagaacagucuc

SEQ ID NO: 25720 - RNA, 20 nt, Artificial Sequence
  spacer sequence TTCN PAM
gugcacuguagaauguuuug

SEQ ID NO: 25721 - RNA, 20 nt, Artificial Sequence
  spacer sequence TTCN PAM
uuguuguaagagacuguucu

SEQ ID NO: 25722 - RNA, 20 nt, Artificial Sequence
  spacer sequence TTCN PAM
cauuuugagucugauaauuc

SEQ ID NO: 25723 - RNA, 20 nt, Artificial Sequence
  spacer sequence TTCN PAM
aacuauucacauuuugaguc

SEQ ID NO: 25724 - RNA, 20 nt, Artificial Sequence
  spacer sequence TTCN PAM
ucagucuucaaacuauucac

SEQ ID NO: 25725 - RNA, 20 nt, Artificial Sequence
  spacer sequence TTCN PAM
guaccucuaaaagaggguuc

SEQ ID NO: 25726 - RNA, 20 nt, Artificial Sequence
  spacer sequence TTCN PAM
auuucuguaccucuaaaaga

SEQ ID NO: 25727 - RNA, 20 nt, Artificial Sequence
  spacer sequence TTCN PAM
caaaaucucuaagaaaauua

SEQ ID NO: 25728 - RNA, 20 nt, Artificial Sequence
  spacer sequence TTCN PAM
uagagauuuugugaauugcu

SEQ ID NO: 25729 - RNA, 20 nt, Artificial Sequence
  spacer sequence TTCN PAM
ugagaucaugcuccuauaca

SEQ ID NO: 25730 - RNA, 20 nt, Artificial Sequence
  spacer sequence TTCN PAM
aguuuuccuugcuauucccu

SEQ ID NO: 25731 - RNA, 20 nt, Artificial Sequence
  spacer sequence TTCN PAM
uugcuauucccugaaaaucu

SEQ ID NO: 25732 - RNA, 20 nt, Artificial Sequence
  spacer sequence TTCN PAM
cugaaaaucuguugcuacuu

SEQ ID NO: 25733 - RNA, 20 nt, Artificial Sequence
  spacer sequence TTCN PAM
gggaauagcaaggaaaacug

SEQ ID NO: 25734 - RNA, 20 nt, Artificial Sequence
  spacer sequence TTCN PAM
uccuaugcauugcggauaug

SEQ ID NO: 25735 - RNA, 20 nt, Artificial Sequence
  spacer sequence TTCN PAM
cuguaucuaccagccauggc

SEQ ID NO: 25736 - RNA, 20 nt, Artificial Sequence
  spacer sequence TTCN PAM
cacuggguuuuuuuuuguug

SEQ ID NO: 25737 - RNA, 20 nt, Artificial Sequence
  spacer sequence TTCN PAM
acaggaaggauuucaauagg

SEQ ID NO: 25738 - RNA, 20 nt, Artificial Sequence
  spacer sequence TTCN PAM
uguggaauuuggacuauucu

SEQ ID NO: 25739 - RNA, 20 nt, Artificial Sequence
  spacer sequence TTCN PAM
auaggauauggaugacaaag

SEQ ID NO: 25740 - RNA, 20 nt, Artificial Sequence
  spacer sequence TTCN PAM
gagcacagggugcugugaga

SEQ ID NO: 25741 - RNA, 20 nt, Artificial Sequence
  spacer sequence TTCN PAM
cuucugagcacagggugcug

SEQ ID NO: 25742 - RNA, 20 nt, Artificial Sequence
  spacer sequence TTCN PAM
aaaugucaguaacuauuuuu

SEQ ID NO: 25743 - RNA, 20 nt, Artificial Sequence
  spacer sequence TTCN PAM
uuuuuuuuaauuugcuauau

SEQ ID NO: 25744 - RNA, 20 nt, Artificial Sequence
  spacer sequence TTCN PAM
uuuuuuuuguuuucuuuuuu

SEQ ID NO: 25745 - RNA, 20 nt, Artificial Sequence
  spacer sequence TTCN PAM
cccucucucuugaccuauug

SEQ ID NO: 25746 - RNA, 20 nt, Artificial Sequence
  spacer sequence TTCN PAM
uucucccucucucuugaccu

SEQ ID NO: 25747 - RNA, 20 nt, Artificial Sequence
  spacer sequence TTCN PAM
uccugcuuuuuaaacaaggg

SEQ ID NO: 25748 - RNA, 20 nt, Artificial Sequence
  spacer sequence TTCN PAM
ugcuuuuuaaacaagggcuc

SEQ ID NO: 25749 - RNA, 20 nt, Artificial Sequence
  spacer sequence TTCN PAM
gcuccuuuuaugccaguuag

SEQ ID NO: 25750 - RNA, 20 nt, Artificial Sequence
  spacer sequence TTCN PAM
uucagcuccuuuuaugccag

SEQ ID NO: 25751 - RNA, 20 nt, Artificial Sequence
  spacer sequence TTCN PAM
caguucuuucagcuccuuuu

SEQ ID NO: 25752 - RNA, 20 nt, Artificial Sequence
  spacer sequence TTCN PAM
gcuucucaguucuuucagcu

SEQ ID NO: 25753 - RNA, 20 nt, Artificial Sequence
  spacer sequence TTCN PAM
uggaguuuccaucaccauuu

SEQ ID NO: 25754 - RNA, 20 nt, Artificial Sequence
  spacer sequence TTCN PAM
aucaccauuuauccaacuac

SEQ ID NO: 25755 - RNA, 20 nt, Artificial Sequence
  spacer sequence TTCN PAM
ugauuucagaucuuagagaa

SEQ ID NO: 25756 - RNA, 20 nt, Artificial Sequence
  spacer sequence TTCN PAM
gaucuuagagaauaggaggg

SEQ ID NO: 25757 - RNA, 20 nt, Artificial Sequence
  spacer sequence TTCN PAM
cuaagaucugaaaucaggaa

SEQ ID NO: 25758 - RNA, 20 nt, Artificial Sequence
  spacer sequence TTCN PAM
uguguguccacucagcccuc

SEQ ID NO: 25759 - RNA, 20 nt, Artificial Sequence
  spacer sequence TTCN PAM
cugcccucccuaaggcaggu

SEQ ID NO: 25760 - RNA, 20 nt, Artificial Sequence
  spacer sequence TTCN PAM
ccgagagcaucucuucugag

SEQ ID NO: 25761 - RNA, 20 nt, Artificial Sequence
  spacer sequence TTCN PAM
gagcagaguccugagcgagg

SEQ ID NO: 25762 - RNA, 20 nt, Artificial Sequence
  spacer sequence TTCN PAM
gaggaagaaaacggagcugu

SEQ ID NO: 25763 - RNA, 20 nt, Artificial Sequence
  spacer sequence TTCN PAM
ucugaaugguccucgcucag

SEQ ID NO: 25764 - RNA, 20 nt, Artificial Sequence
  spacer sequence TTCN PAM
uccucugaaugguccucgcu

SEQ ID NO: 25765 - RNA, 20 nt, Artificial Sequence
  spacer sequence TTCN PAM
aaggaggcagagaguacaug

SEQ ID NO: 25766 - RNA, 20 nt, Artificial Sequence
  spacer sequence TTCN PAM
aaacuggccauguacucucu

SEQ ID NO: 25767 - RNA, 20 nt, Artificial Sequence
  spacer sequence TTCN PAM
aaguagcuggaguacaggga

SEQ ID NO: 25768 - RNA, 20 nt, Artificial Sequence
  spacer sequence TTCN PAM
cuguacuccagcuacuugga

SEQ ID NO: 25769 - RNA, 20 nt, Artificial Sequence
  spacer sequence TTCN PAM
cugagugcuccucuucccug

SEQ ID NO: 25770 - RNA, 20 nt, Artificial Sequence
  spacer sequence TTCN PAM
aucccaaauccacacaagaa

SEQ ID NO: 25771 - RNA, 20 nt, Artificial Sequence
  spacer sequence TTCN PAM
uguguggauuugggauugaa

SEQ ID NO: 25772 - RNA, 20 nt, Artificial Sequence
  spacer sequence TTCN PAM
gguccuuguugcuucuugug

SEQ ID NO: 25773 - RNA, 20 nt, Artificial Sequence
  spacer sequence TTCN PAM
aacugccaccuccuugguuc

SEQ ID NO: 25774 - RNA, 20 nt, Artificial Sequence
  spacer sequence TTCN PAM
cuccauuccaacugccaccu

SEQ ID NO: 25775 - RNA, 20 nt, Artificial Sequence
  spacer sequence TTCN PAM
acgagcagugugauggaccc

SEQ ID NO: 25776 - RNA, 20 nt, Artificial Sequence
  spacer sequence TTCN PAM
ugggauaggcaguuuccuaa

SEQ ID NO: 25777 - RNA, 20 nt, Artificial Sequence
  spacer sequence TTCN PAM
uaagauaguccuccaugauc

SEQ ID NO: 25778 - RNA, 20 nt, Artificial Sequence
  spacer sequence TTCN PAM
gcuauugauguccuugugua

SEQ ID NO: 25779 - RNA, 20 nt, Artificial Sequence
  spacer sequence TTCN PAM
agaggaggggauuacacaag

SEQ ID NO: 25780 - RNA, 20 nt, Artificial Sequence
  spacer sequence TTCN PAM
uuggaggcaagucacuaggu

SEQ ID NO: 25781 - RNA, 20 nt, Artificial Sequence
  spacer sequence TTCN PAM
auucauuggaggcaagucac

SEQ ID NO: 25782 - RNA, 20 nt, Artificial Sequence
  spacer sequence TTCN PAM
uccgagauuagguuauaaaa

SEQ ID NO: 25783 - RNA, 20 nt, Artificial Sequence
  spacer sequence TTCN PAM
gagauuagguuauaaaagau

SEQ ID NO: 25784 - RNA, 20 nt, Artificial Sequence
  spacer sequence TTCN PAM
aaacacugugccucaaagcu

SEQ ID NO: 25785 - RNA, 20 nt, Artificial Sequence
  spacer sequence TTCN PAM
uugugacuauaacccuaucu

SEQ ID NO: 25786 - RNA, 20 nt, Artificial Sequence
  spacer sequence TTCN PAM
cuuauuccuugugacuauaa

SEQ ID NO: 25787 - RNA, 20 nt, Artificial Sequence
  spacer sequence TTCN PAM
ucucuuauuccuugugacua

SEQ ID NO: 25788 - RNA, 20 nt, Artificial Sequence
  spacer sequence TTCN PAM
aguacauuuggagaacuucu

SEQ ID NO: 25789 - RNA, 20 nt, Artificial Sequence
  spacer sequence TTCN PAM
ccaaauguacuugaaauuuu

SEQ ID NO: 25790 - RNA, 20 nt, Artificial Sequence
  spacer sequence TTCN PAM
ggagcacuaauuuauuuauc

SEQ ID NO: 25791 - RNA, 20 nt, Artificial Sequence
  spacer sequence TTCN PAM
uuuucaguagagaugggguu

SEQ ID NO: 25792 - RNA, 20 nt, Artificial Sequence
  spacer sequence TTCN PAM
guagagaugggguuucacca

SEQ ID NO: 25793 - RNA, 20 nt, Artificial Sequence
  spacer sequence TTCN PAM
ccauguuggccacacugguc

SEQ ID NO: 25794 - RNA, 20 nt, Artificial Sequence
  spacer sequence TTCN PAM
ggaccaguguggccaacaug

SEQ ID NO: 25795 - RNA, 20 nt, Artificial Sequence
  spacer sequence TTCN PAM
uaauaacuucuacugaauua

SEQ ID NO: 25796 - RNA, 20 nt, Artificial Sequence
  spacer sequence TTCN PAM
acugaauuagacuuuuauuu

SEQ ID NO: 25797 - RNA, 20 nt, Artificial Sequence
  spacer sequence TTCN PAM
guagaaguuauuaggaaacc

SEQ ID NO: 25798 - RNA, 20 nt, Artificial Sequence
  spacer sequence TTCN PAM
cuacuuacaacacuuugaca

SEQ ID NO: 25799 - RNA, 20 nt, Artificial Sequence
  spacer sequence TTCN PAM
agcuuaauggagagacaguc

SEQ ID NO: 25800 - RNA, 20 nt, Artificial Sequence
  spacer sequence TTCN PAM
aagaucuucuagcuuaaugg

SEQ ID NO: 25801 - RNA, 20 nt, Artificial Sequence
  spacer sequence TTCN PAM
ugucuuccaagaucuucuag

SEQ ID NO: 25802 - RNA, 20 nt, Artificial Sequence
  spacer sequence TTCN PAM
acuuugcagcccuaacacuu

SEQ ID NO: 25803 - RNA, 20 nt, Artificial Sequence
  spacer sequence TTCN PAM
acaaacacuuggucacuauu

SEQ ID NO: 25804 - RNA, 20 nt, Artificial Sequence
  spacer sequence TTCN PAM
aguuguugaauauucucaaa

SEQ ID NO: 25805 - RNA, 20 nt, Artificial Sequence
  spacer sequence TTCN PAM
acaacuagaaucucauucaa

SEQ ID NO: 25806 - RNA, 20 nt, Artificial Sequence
  spacer sequence TTCN PAM
caaaaucucuaucaaacuuu

SEQ ID NO: 25807 - RNA, 20 nt, Artificial Sequence
  spacer sequence TTCN PAM
acucccaagaggaauuugga

SEQ ID NO: 25808 - RNA, 20 nt, Artificial Sequence
  spacer sequence TTCN PAM
ucuugggaguagaacuagau

SEQ ID NO: 25809 - RNA, 20 nt, Artificial Sequence
  spacer sequence TTCN PAM
gguaaaccaaaacuagcaga

SEQ ID NO: 25810 - RNA, 20 nt, Artificial Sequence
  spacer sequence TTCN PAM
gccucugcuaguuuugguuu

SEQ ID NO: 25811 - RNA, 20 nt, Artificial Sequence
  spacer sequence TTCN PAM
uauuaaucuuucugccucug

SEQ ID NO: 25812 - RNA, 20 nt, Artificial Sequence
  spacer sequence TTCN PAM
ccagcgcuauuuuuugacau

SEQ ID NO: 25813 - RNA, 20 nt, Artificial Sequence
  spacer sequence TTCN PAM
uucauuauuugccaugguau

SEQ ID NO: 25814 - RNA, 20 nt, Artificial Sequence
  spacer sequence TTCN PAM
uuauuugccaugguauaaau

SEQ ID NO: 25815 - RNA, 20 nt, Artificial Sequence
  spacer sequence TTCN PAM
cacgucucauguuuuaaaca

SEQ ID NO: 25816 - RNA, 20 nt, Artificial Sequence
  spacer sequence TTCN PAM
gaaagaauuugaaaguguga

SEQ ID NO: 25817 - RNA, 20 nt, Artificial Sequence
  spacer sequence TTCN PAM
gaaaugucuaaguauucuca

SEQ ID NO: 25818 - RNA, 20 nt, Artificial Sequence
  spacer sequence TTCN PAM
uucugaaaugucuaaguauu

SEQ ID NO: 25819 - RNA, 20 nt, Artificial Sequence
  spacer sequence TTCN PAM
aauucuuucugaaaugucua

SEQ ID NO: 25820 - RNA, 20 nt, Artificial Sequence
  spacer sequence TTCN PAM
ccuaacuucuacagaaauuc

SEQ ID NO: 25821 - RNA, 20 nt, Artificial Sequence
  spacer sequence TTCN PAM
acagaaauuccacagauuca

SEQ ID NO: 25822 - RNA, 20 nt, Artificial Sequence
  spacer sequence TTCN PAM
guagaaguuaggagaagcau

SEQ ID NO: 25823 - RNA, 20 nt, Artificial Sequence
  spacer sequence TTCN PAM
acagauucaugaauucauuu

SEQ ID NO: 25824 - RNA, 20 nt, Artificial Sequence
  spacer sequence TTCN PAM
ugaauucauuuauuuagcaa

SEQ ID NO: 25825 - RNA, 20 nt, Artificial Sequence
  spacer sequence TTCN PAM
ugaaucuguggaauuucugu

SEQ ID NO: 25826 - RNA, 20 nt, Artificial Sequence
  spacer sequence TTCN PAM
uuuauuuagcaaaugacucc

SEQ ID NO: 25827 - RNA, 20 nt, Artificial Sequence
  spacer sequence TTCN PAM
uacgggaccuuggacacauu

SEQ ID NO: 25828 - RNA, 20 nt, Artificial Sequence
  spacer sequence TTCN PAM
cauuuagacccggggcagag

SEQ ID NO: 25829 - RNA, 20 nt, Artificial Sequence
  spacer sequence TTCN PAM
aacccagcucugccccgggu

SEQ ID NO: 25830 - RNA, 20 nt, Artificial Sequence
  spacer sequence TTCN PAM
gcuuuucaaugaauaaguua

SEQ ID NO: 25831 - RNA, 20 nt, Artificial Sequence
  spacer sequence TTCN PAM
augaauaaguuauuuuuauc

SEQ ID NO: 25832 - RNA, 20 nt, Artificial Sequence
  spacer sequence TTCN PAM
uugaaaagcggaacugagau

SEQ ID NO: 25833 - RNA, 20 nt, Artificial Sequence
  spacer sequence TTCN PAM
ccauuagugcuugacacauu

SEQ ID NO: 25834 - RNA, 20 nt, Artificial Sequence
  spacer sequence TTCN PAM
uuuguauuuccccauuagug

SEQ ID NO: 25835 - RNA, 20 nt, Artificial Sequence
  spacer sequence TTCN PAM
aggaaucuccagucuggcug

SEQ ID NO: 25836 - RNA, 20 nt, Artificial Sequence
  spacer sequence TTCN PAM
uagaaaguugauuuaauguc

SEQ ID NO: 25837 - RNA, 20 nt, Artificial Sequence
  spacer sequence TTCN PAM
agccucugcucagguaacua

SEQ ID NO: 25838 - RNA, 20 nt, Artificial Sequence
  spacer sequence TTCN PAM
ugguuggucaggauaagaua

SEQ ID NO: 25839 - RNA, 20 nt, Artificial Sequence
  spacer sequence TTCN PAM
uuagcaugaaaauuuuccca

SEQ ID NO: 25840 - RNA, 20 nt, Artificial Sequence
  spacer sequence TTCN PAM
ugcuaaugaaauacguucau

SEQ ID NO: 25841 - RNA, 20 nt, Artificial Sequence
  spacer sequence TTCN PAM
caaugcuuuugagauucagc

SEQ ID NO: 25842 - RNA, 20 nt, Artificial Sequence
  spacer sequence TTCN PAM
gccagcacacccuguccuaa

SEQ ID NO: 25843 - RNA, 20 nt, Artificial Sequence
  spacer sequence TTCN PAM
guguuaggacagggugugcu

SEQ ID NO: 25844 - RNA, 20 nt, Artificial Sequence
  spacer sequence TTCN PAM
uggccucaauaccuguggaa

SEQ ID NO: 25845 - RNA, 20 nt, Artificial Sequence
  spacer sequence TTCN PAM
acagguauugaggccaggaa

SEQ ID NO: 25846 - RNA, 20 nt, Artificial Sequence
  spacer sequence TTCN PAM
cuuuucauuuagcuuacauu

SEQ ID NO: 25847 - RNA, 20 nt, Artificial Sequence
  spacer sequence TTCN PAM
uuuagcuuacauuugcugcc

SEQ ID NO: 25848 - RNA, 20 nt, Artificial Sequence
  spacer sequence TTCN PAM
uccccuucauuccuggacuc

SEQ ID NO: 25849 - RNA, 20 nt, Artificial Sequence
  spacer sequence TTCN PAM
ccuucauuccuggacucucu

SEQ ID NO: 25850 - RNA, 20 nt, Artificial Sequence
  spacer sequence TTCN PAM
uuccuggacucucuccuuuc

SEQ ID NO: 25851 - RNA, 20 nt, Artificial Sequence
  spacer sequence TTCN PAM
uggacucucuccuuucuucu

SEQ ID NO: 25852 - RNA, 20 nt, Artificial Sequence
  spacer sequence TTCN PAM
ucucaaacaaggggcccacu

SEQ ID NO: 25853 - RNA, 20 nt, Artificial Sequence
  spacer sequence TTCN PAM
caaacaaggggcccacuucg

SEQ ID NO: 25854 - RNA, 20 nt, Artificial Sequence
  spacer sequence TTCN PAM
gucuugaccaagcccuucau

SEQ ID NO: 25855 - RNA, 20 nt, Artificial Sequence
  spacer sequence TTCN PAM
ucuuccugaauuucucagcu

SEQ ID NO: 25856 - RNA, 20 nt, Artificial Sequence
  spacer sequence TTCN PAM
ugaauuucucagcuaaaucg

SEQ ID NO: 25857 - RNA, 20 nt, Artificial Sequence
  spacer sequence TTCN PAM
ggaagaugaagggcuugguc

SEQ ID NO: 25858 - RNA, 20 nt, Artificial Sequence
  spacer sequence TTCN PAM
cagcuaaaucguuucuaacg

SEQ ID NO: 25859 - RNA, 20 nt, Artificial Sequence
  spacer sequence TTCN PAM
aacgcuucccuuuuuccaac

SEQ ID NO: 25860 - RNA, 20 nt, Artificial Sequence
  spacer sequence TTCN PAM
cuuuuuccaacauaaauagu

SEQ ID NO: 25861 - RNA, 20 nt, Artificial Sequence
  spacer sequence TTCN PAM
aacauaaauaguucuuucuc

SEQ ID NO: 25862 - RNA, 20 nt, Artificial Sequence
  spacer sequence TTCN PAM
uucucgcucauugucccacc

SEQ ID NO: 25863 - RNA, 20 nt, Artificial Sequence
  spacer sequence TTCN PAM
cgcucauugucccacccugc

SEQ ID NO: 25864 - RNA, 20 nt, Artificial Sequence
  spacer sequence TTCN PAM
uuuuuaagaaucucuguagc

SEQ ID NO: 25865 - RNA, 20 nt, Artificial Sequence
  spacer sequence TTCN PAM
uaaaaaggaaaaauaaauau

SEQ ID NO: 25866 - RNA, 20 nt, Artificial Sequence
  spacer sequence TTCN PAM
gaaaugaggcaacgcagcuc

SEQ ID NO: 25867 - RNA, 20 nt, Artificial Sequence
  spacer sequence TTCN PAM
gaagaguagaggcuacagag

SEQ ID NO: 25868 - RNA, 20 nt, Artificial Sequence
  spacer sequence TTCN PAM
gugaccauaauaaagggcuu

SEQ ID NO: 25869 - RNA, 20 nt, Artificial Sequence
  spacer sequence TTCN PAM
uggagauccuucccucauuu

SEQ ID NO: 25870 - RNA, 20 nt, Artificial Sequence
  spacer sequence TTCN PAM
cucauuuaucugucaucuca

SEQ ID NO: 25871 - RNA, 20 nt, Artificial Sequence
  spacer sequence TTCN PAM
aggucacaucauuuccuagc

SEQ ID NO: 25872 - RNA, 20 nt, Artificial Sequence
  spacer sequence TTCN PAM
uagcaucuaaaguguugucu

SEQ ID NO: 25873 - RNA, 20 nt, Artificial Sequence
  spacer sequence TTCN PAM
acuccuccauugcuuuaaaa

SEQ ID NO: 25874 - RNA, 20 nt, Artificial Sequence
  spacer sequence TTCN PAM
agcaccacgaggcacucacu

SEQ ID NO: 25875 - RNA, 20 nt, Artificial Sequence
  spacer sequence TTCN PAM
acauuccagcaccacgaggc

SEQ ID NO: 25876 - RNA, 20 nt, Artificial Sequence
  spacer sequence TTCN PAM
aauuucaaugaagggcaugc

SEQ ID NO: 25877 - RNA, 20 nt, Artificial Sequence
  spacer sequence TTCN PAM
augaagggcaugcugccauu

SEQ ID NO: 25878 - RNA, 20 nt, Artificial Sequence
  spacer sequence TTCN PAM
uugaaauuagaagagacuuu

SEQ ID NO: 25879 - RNA, 20 nt, Artificial Sequence
  spacer sequence TTCN PAM
agagaaggaagaggaacaaa

SEQ ID NO: 25880 - RNA, 20 nt, Artificial Sequence
  spacer sequence TTCN PAM
cuggaaaauggcagcaugcc

SEQ ID NO: 25881 - RNA, 20 nt, Artificial Sequence
  spacer sequence TTCN PAM
uucucuggaaaauggcagca

SEQ ID NO: 25882 - RNA, 20 nt, Artificial Sequence
  spacer sequence TTCN PAM
ucuuccuucucuggaaaaug

SEQ ID NO: 25883 - RNA, 20 nt, Artificial Sequence
  spacer sequence TTCN PAM
aagaaccuguugauguuaau

SEQ ID NO: 25884 - RNA, 20 nt, Artificial Sequence
  spacer sequence TTCN PAM
uugaaaacaaggcuauaugu

SEQ ID NO: 25885 - RNA, 20 nt, Artificial Sequence
  spacer sequence TTCN PAM
uugagacagcuaacaguaac

SEQ ID NO: 25886 - RNA, 20 nt, Artificial Sequence
  spacer sequence TTCN PAM
ggaaacacagacagcccuca

SEQ ID NO: 25887 - RNA, 20 nt, Artificial Sequence
  spacer sequence TTCN PAM
ggaagauuccagggaauacu

SEQ ID NO: 25888 - RNA, 20 nt, Artificial Sequence
  spacer sequence TTCN PAM
ugaggccccaaaucccugag

SEQ ID NO: 25889 - RNA, 20 nt, Artificial Sequence
  spacer sequence TTCN PAM
uguuauguguugaauugugu

SEQ ID NO: 25890 - RNA, 20 nt, Artificial Sequence
  spacer sequence TTCN PAM
acacauaacaugaaccaagu

SEQ ID NO: 25891 - RNA, 20 nt, Artificial Sequence
  spacer sequence TTCN PAM
gagguacuagggguuaagac

SEQ ID NO: 25892 - RNA, 20 nt, Artificial Sequence
  spacer sequence TTCN PAM
uagggcuacugugacaaagu

SEQ ID NO: 25893 - RNA, 20 nt, Artificial Sequence
  spacer sequence TTCN PAM
uuuagcaaaaagucuugguu

SEQ ID NO: 25894 - RNA, 20 nt, Artificial Sequence
  spacer sequence TTCN PAM
agugucccuccaggugcugu

SEQ ID NO: 25895 - RNA, 20 nt, Artificial Sequence
  spacer sequence TTCN PAM
aaagagggcauggaacugca

SEQ ID NO: 25896 - RNA, 20 nt, Artificial Sequence
  spacer sequence TTCN PAM
augcccucuuuugaagaccc

SEQ ID NO: 25897 - RNA, 20 nt, Artificial Sequence
  spacer sequence TTCN PAM
ccugcaguuccaugcccucu

SEQ ID NO: 25898 - RNA, 20 nt, Artificial Sequence
  spacer sequence TTCN PAM
cuuauuuagcacaaacucua

SEQ ID NO: 25899 - RNA, 20 nt, Artificial Sequence
  spacer sequence TTCN PAM
uucauucaacaaauauuugu

SEQ ID NO: 25900 - RNA, 20 nt, Artificial Sequence
  spacer sequence TTCN PAM
uucaacaaauauuuguuaag

SEQ ID NO: 25901 - RNA, 20 nt, Artificial Sequence
  spacer sequence TTCN PAM
acaaauauuuguuaagcccc

SEQ ID NO: 25902 - RNA, 20 nt, Artificial Sequence
  spacer sequence TTCN PAM
gggguucuagcagugagcag

SEQ ID NO: 25903 - RNA, 20 nt, Artificial Sequence
  spacer sequence TTCN PAM
acaguauauauccauaucuc

SEQ ID NO: 25904 - RNA, 20 nt, Artificial Sequence
  spacer sequence TTCN PAM
ugaucccccacaaaugggau

SEQ ID NO: 25905 - RNA, 20 nt, Artificial Sequence
  spacer sequence TTCN PAM
cagagaccuaaagugcaaua

SEQ ID NO: 25906 - RNA, 20 nt, Artificial Sequence
  spacer sequence TTCN PAM
uuguuuuaagccaccuaguu

SEQ ID NO: 25907 - RNA, 20 nt, Artificial Sequence
  spacer sequence TTCN PAM
ggagaccagaaggcugaaau

SEQ ID NO: 25908 - RNA, 20 nt, Artificial Sequence
  spacer sequence TTCN PAM
ggucuccagaacugugagag

SEQ ID NO: 25909 - RNA, 20 nt, Artificial Sequence
  spacer sequence TTCN PAM
gccuucuggucuccagaacu

SEQ ID NO: 25910 - RNA, 20 nt, Artificial Sequence
  spacer sequence TTCN PAM
uucuugggccucaaaaggag

SEQ ID NO: 25911 - RNA, 20 nt, Artificial Sequence
  spacer sequence TTCN PAM
ugggccucaaaaggagaguc

SEQ ID NO: 25912 - RNA, 20 nt, Artificial Sequence
  spacer sequence TTCN PAM
uagguauaagcugguuccca

SEQ ID NO: 25913 - RNA, 20 nt, Artificial Sequence
  spacer sequence TTCN PAM
uuccuagguauaagcugguu

SEQ ID NO: 25914 - RNA, 20 nt, Artificial Sequence
  spacer sequence TTCN PAM
gcaugagaaguaaucccacc

SEQ ID NO: 25915 - RNA, 20 nt, Artificial Sequence
  spacer sequence TTCN PAM
caugccgaaucaaaguuuua

SEQ ID NO: 25916 - RNA, 20 nt, Artificial Sequence
  spacer sequence TTCN PAM
cuaggucauucucuggauuc

SEQ ID NO: 25917 - RNA, 20 nt, Artificial Sequence
  spacer sequence TTCN PAM
uuuucuagacugguugaguc

SEQ ID NO: 25918 - RNA, 20 nt, Artificial Sequence
  spacer sequence TTCN PAM
agacugguugaguccaacaa

SEQ ID NO: 25919 - RNA, 20 nt, Artificial Sequence
  spacer sequence TTCN PAM
guagaguuggcuaaucugcu

SEQ ID NO: 25920 - RNA, 20 nt, Artificial Sequence
  spacer sequence TTCN PAM
caagggagaaaggaaagagu

SEQ ID NO: 25921 - RNA, 20 nt, Artificial Sequence
  spacer sequence TTCN PAM
cccuugugaauaucacuauu

SEQ ID NO: 25922 - RNA, 20 nt, Artificial Sequence
  spacer sequence TTCN PAM
uuucucccuugugaauauca

SEQ ID NO: 25923 - RNA, 20 nt, Artificial Sequence
  spacer sequence TTCN PAM
aauaaauauuuuaagauaga

SEQ ID NO: 25924 - RNA, 20 nt, Artificial Sequence
  spacer sequence TTCN PAM
aucuuaaaauauuuauuuga

SEQ ID NO: 25925 - RNA, 20 nt, Artificial Sequence
  spacer sequence TTCN PAM
cgggauuuaauuucuaucuu

SEQ ID NO: 25926 - RNA, 20 nt, Artificial Sequence
  spacer sequence TTCN PAM
gaugauucacgggauuuaau

SEQ ID NO: 25927 - RNA, 20 nt, Artificial Sequence
  spacer sequence TTCN PAM
uauuugugauuuucugauga

SEQ ID NO: 25928 - RNA, 20 nt, Artificial Sequence
  spacer sequence TTCN PAM
cuuuuauuauauuuuggggu

SEQ ID NO: 25929 - RNA, 20 nt, Artificial Sequence
  spacer sequence TTCN PAM
cacguuuugaacucauauuc

SEQ ID NO: 25930 - RNA, 20 nt, Artificial Sequence
  spacer sequence TTCN PAM
aaacgugggaaccuuccuga

SEQ ID NO: 25931 - RNA, 20 nt, Artificial Sequence
  spacer sequence TTCN PAM
uauccuuugauucauugaau

SEQ ID NO: 25932 - RNA, 20 nt, Artificial Sequence
  spacer sequence TTCN PAM
uugaauuuuuggccauucuc

SEQ ID NO: 25933 - RNA, 20 nt, Artificial Sequence
  spacer sequence TTCN PAM
augaaucaaaggauaggaau

SEQ ID NO: 25934 - RNA, 20 nt, Artificial Sequence
  spacer sequence TTCN PAM
cgcauuaggucaaaaaaaaa

SEQ ID NO: 25935 - RNA, 20 nt, Artificial Sequence
  spacer sequence TTCN PAM
uggggaauagccaacuucuu

SEQ ID NO: 25936 - RNA, 20 nt, Artificial Sequence
  spacer sequence TTCN PAM
ccaugaaacucugagcaacu

SEQ ID NO: 25937 - RNA, 20 nt, Artificial Sequence
  spacer sequence TTCN PAM
uuuccaagaccugccuugua

SEQ ID NO: 25938 - RNA, 20 nt, Artificial Sequence
  spacer sequence TTCN PAM
aagaccugccuuguacuucc

SEQ ID NO: 25939 - RNA, 20 nt, Artificial Sequence
  spacer sequence TTCN PAM
ugcuucucucacugggggca

SEQ ID NO: 25940 - RNA, 20 nt, Artificial Sequence
  spacer sequence TTCN PAM
cucacugggggcaaauaaaa

SEQ ID NO: 25941 - RNA, 20 nt, Artificial Sequence
  spacer sequence TTCN PAM
cugggauaauuugucuccua

SEQ ID NO: 25942 - RNA, 20 nt, Artificial Sequence
  spacer sequence TTCN PAM
uagaacagaguaaaaauuau

SEQ ID NO: 25943 - RNA, 20 nt, Artificial Sequence
  spacer sequence TTCN PAM
aggaagcuuucucugggaua

SEQ ID NO: 25944 - RNA, 20 nt, Artificial Sequence
  spacer sequence TTCN PAM
auaauuuuuacucuguucua

SEQ ID NO: 25945 - RNA, 20 nt, Artificial Sequence
  spacer sequence TTCN PAM
gccacuuguuaucauuuuuc

SEQ ID NO: 25946 - RNA, 20 nt, Artificial Sequence
  spacer sequence TTCN PAM
gagaaauaaaugugauuuau

SEQ ID NO: 25947 - RNA, 20 nt, Artificial Sequence
  spacer sequence TTCN PAM
cugaacauuucagccacuug

SEQ ID NO: 25948 - RNA, 20 nt, Artificial Sequence
  spacer sequence TTCN PAM
cgucugugcuuaugugcucu

SEQ ID NO: 25949 - RNA, 20 nt, Artificial Sequence
  spacer sequence TTCN PAM
cuucacaucuggugaccuuu

SEQ ID NO: 25950 - RNA, 20 nt, Artificial Sequence
  spacer sequence TTCN PAM
caucuggugaccuuuggaac

SEQ ID NO: 25951 - RNA, 20 nt, Artificial Sequence
  spacer sequence TTCN PAM
aaaggucaccagaugugaag

SEQ ID NO: 25952 - RNA, 20 nt, Artificial Sequence
  spacer sequence TTCN PAM
gaaaaacuuccaccacacac

SEQ ID NO: 25953 - RNA, 20 nt, Artificial Sequence
  spacer sequence TTCN PAM
gaaaguuccaaaggucacca

SEQ ID NO: 25954 - RNA, 20 nt, Artificial Sequence
  spacer sequence TTCN PAM
accacacacaaacaccuaag

SEQ ID NO: 25955 - RNA, 20 nt, Artificial Sequence
  spacer sequence TTCN PAM
uagauguaccuuuuaauuuu

SEQ ID NO: 25956 - RNA, 20 nt, Artificial Sequence
  spacer sequence TTCN PAM
uuguuuuguauuuuagucca

SEQ ID NO: 25957 - RNA, 20 nt, Artificial Sequence
  spacer sequence TTCN PAM
uaagaacuuaaucaaaaacu

SEQ ID NO: 25958 - RNA, 20 nt, Artificial Sequence
  spacer sequence TTCN PAM
uaagaaaugccucucaagau

SEQ ID NO: 25959 - RNA, 20 nt, Artificial Sequence
  spacer sequence TTCN PAM
guauccaauauuguaaaguc

SEQ ID NO: 25960 - RNA, 20 nt, Artificial Sequence
  spacer sequence TTCN PAM
aaggaugaagaugugaaagg

SEQ ID NO: 25961 - RNA, 20 nt, Artificial Sequence
  spacer sequence TTCN PAM
uccuuggaaacucaaauuga

SEQ ID NO: 25962 - RNA, 20 nt, Artificial Sequence
  spacer sequence TTCN PAM
caucuucauccuuggaaacu

SEQ ID NO: 25963 - RNA, 20 nt, Artificial Sequence
  spacer sequence TTCN PAM
uucucaacauauuugcuaaa

SEQ ID NO: 25964 - RNA, 20 nt, Artificial Sequence
  spacer sequence TTCN PAM
caacauauuugcuaaagaaa

SEQ ID NO: 25965 - RNA, 20 nt, Artificial Sequence
  spacer sequence TTCN PAM
uuagcaaauauguugagaag

SEQ ID NO: 25966 - RNA, 20 nt, Artificial Sequence
  spacer sequence TTCN PAM
uccucuuucuuuagcaaaua

SEQ ID NO: 25967 - RNA, 20 nt, Artificial Sequence
  spacer sequence TTCN PAM
uuucauccucuuucuuuagc

SEQ ID NO: 25968 - RNA, 20 nt, Artificial Sequence
  spacer sequence TTCN PAM
uuguuaucagccaguuaguu

SEQ ID NO: 25969 - RNA, 20 nt, Artificial Sequence
  spacer sequence TTCN PAM
gucuucgcagcauuuucucc

SEQ ID NO: 25970 - RNA, 20 nt, Artificial Sequence
  spacer sequence TTCN PAM
cagcauuuucuccucauaua

SEQ ID NO: 25971 - RNA, 20 nt, Artificial Sequence
  spacer sequence TTCN PAM
ccucauauaccugauuuucu

SEQ ID NO: 25972 - RNA, 20 nt, Artificial Sequence
  spacer sequence TTCN PAM
caccauucuguuacagaaua

SEQ ID NO: 25973 - RNA, 20 nt, Artificial Sequence
  spacer sequence TTCN PAM
guuacagaauaugagacaag

SEQ ID NO: 25974 - RNA, 20 nt, Artificial Sequence
  spacer sequence TTCN PAM
guaacagaauggugagaaaa

SEQ ID NO: 25975 - RNA, 20 nt, Artificial Sequence
  spacer sequence TTCN PAM
aauaagagccugcugcucuu

SEQ ID NO: 25976 - RNA, 20 nt, Artificial Sequence
  spacer sequence TTCN PAM
auaccaaagagcagcaggcu

SEQ ID NO: 25977 - RNA, 20 nt, Artificial Sequence
  spacer sequence TTCN PAM
uugagguuuuuguuuuguuu

SEQ ID NO: 25978 - RNA, 20 nt, Artificial Sequence
  spacer sequence TTCN PAM
uggcugcuaaacuuaaaaaa

SEQ ID NO: 25979 - RNA, 20 nt, Artificial Sequence
  spacer sequence TTCN PAM
agaguuaaggcugauaaaac

SEQ ID NO: 25980 - RNA, 20 nt, Artificial Sequence
  spacer sequence TTCN PAM
cccacacuugggcaggugag

SEQ ID NO: 25981 - RNA, 20 nt, Artificial Sequence
  spacer sequence TTCN PAM
ggacucauguuuucucccac

SEQ ID NO: 25982 - RNA, 20 nt, Artificial Sequence
  spacer sequence TTCN PAM
caaaauagaaagauuuuucu

SEQ ID NO: 25983 - RNA, 20 nt, Artificial Sequence
  spacer sequence TTCN PAM
auuuugagaaaggcaauuua

SEQ ID NO: 25984 - RNA, 20 nt, Artificial Sequence
  spacer sequence TTCN PAM
gguuuuauuuggccugggaa

SEQ ID NO: 25985 - RNA, 20 nt, Artificial Sequence
  spacer sequence TTCN PAM
caggccaaauaaaaccagaa

SEQ ID NO: 25986 - RNA, 20 nt, Artificial Sequence
  spacer sequence TTCN PAM
gcuuuguucccaggccaaau

SEQ ID NO: 25987 - RNA, 20 nt, Artificial Sequence
  spacer sequence TTCN PAM
cccucuaacaucugcuucuu

SEQ ID NO: 25988 - RNA, 20 nt, Artificial Sequence
  spacer sequence TTCN PAM
uggaucucugggaggcucag

SEQ ID NO: 25989 - RNA, 20 nt, Artificial Sequence
  spacer sequence TTCN PAM
gagccucccagagauccaag

SEQ ID NO: 25990 - RNA, 20 nt, Artificial Sequence
  spacer sequence TTCN PAM
caguuucugagccucccaga

SEQ ID NO: 25991 - RNA, 20 nt, Artificial Sequence
  spacer sequence TTCN PAM
uccauaaaggugcuuagggg

SEQ ID NO: 25992 - RNA, 20 nt, Artificial Sequence
  spacer sequence TTCN PAM
agaaauuaaucggagucuua

SEQ ID NO: 25993 - RNA, 20 nt, Artificial Sequence
  spacer sequence TTCN PAM
uuaacuguguuggucaguca

SEQ ID NO: 25994 - RNA, 20 nt, Artificial Sequence
  spacer sequence TTCN PAM
cuguuccuuuucguacacau

SEQ ID NO: 25995 - RNA, 20 nt, Artificial Sequence
  spacer sequence TTCN PAM
uuuucguacacaucuuccaa

SEQ ID NO: 25996 - RNA, 20 nt, Artificial Sequence
  spacer sequence TTCN PAM
uacacaucuuccaaacccac

SEQ ID NO: 25997 - RNA, 20 nt, Artificial Sequence
  spacer sequence TTCN PAM
aaacccaccaucuucccaaa

SEQ ID NO: 25998 - RNA, 20 nt, Artificial Sequence
  spacer sequence TTCN PAM
caaaccaggccuauuaacca

SEQ ID NO: 25999 - RNA, 20 nt, Artificial Sequence
  spacer sequence TTCN PAM
gguuaauaggccugguuugg

SEQ ID NO: 26000 - RNA, 20 nt, Artificial Sequence
  spacer sequence TTCN PAM
gaaacauuguuuguuuaaau

SEQ ID NO: 26001 - RNA, 20 nt, Artificial Sequence
  spacer sequence TTCN PAM
gaauugauuucugguuaaua

SEQ ID NO: 26002 - RNA, 20 nt, Artificial Sequence
  spacer sequence TTCN PAM
ccaguugggcuuuuggucca

SEQ ID NO: 26003 - RNA, 20 nt, Artificial Sequence
  spacer sequence TTCN PAM
caaggucauuguuacucaga

SEQ ID NO: 26004 - RNA, 20 nt, Artificial Sequence
  spacer sequence TTCN PAM
auuggugaauuuuugcuguu

SEQ ID NO: 26005 - RNA, 20 nt, Artificial Sequence
  spacer sequence TTCN PAM
ccaauggaacaugugcaaaa

SEQ ID NO: 26006 - RNA, 20 nt, Artificial Sequence
  spacer sequence TTCN PAM
uuuuuuuuuuuuuuaaaugg

SEQ ID NO: 26007 - RNA, 20 nt, Artificial Sequence
  spacer sequence TTCN PAM
cauuuaaaaaaaaaaaaaaa

SEQ ID NO: 26008 - RNA, 20 nt, Artificial Sequence
  spacer sequence TTCN PAM
uaugcugcuguucaaucgga

SEQ ID NO: 26009 - RNA, 20 nt, Artificial Sequence
  spacer sequence TTCN PAM
aucggagucugaaagcugaa

SEQ ID NO: 26010 - RNA, 20 nt, Artificial Sequence
  spacer sequence TTCN PAM
gacuccgauugaacagcagc

SEQ ID NO: 26011 - RNA, 20 nt, Artificial Sequence
  spacer sequence TTCN PAM
gcuuucagacuccgauugaa

SEQ ID NO: 26012 - RNA, 20 nt, Artificial Sequence
  spacer sequence TTCN PAM
auuacagcacaaccuugugg

SEQ ID NO: 26013 - RNA, 20 nt, Artificial Sequence
  spacer sequence TTCN PAM
aauagcccggcuucugccuc

SEQ ID NO: 26014 - RNA, 20 nt, Artificial Sequence
  spacer sequence TTCN PAM
gccucgcugugagacagugg

SEQ ID NO: 26015 - RNA, 20 nt, Artificial Sequence
  spacer sequence TTCN PAM
ucucuaaaauggggauagcg

SEQ ID NO: 26016 - RNA, 20 nt, Artificial Sequence
  spacer sequence TTCN PAM
uauaaagauuaaaagcagug

SEQ ID NO: 26017 - RNA, 20 nt, Artificial Sequence
  spacer sequence TTCN PAM
uuagacaucagggagccagg

SEQ ID NO: 26018 - RNA, 20 nt, Artificial Sequence
  spacer sequence TTCN PAM
gagcagcccaguacaggacu

SEQ ID NO: 26019 - RNA, 20 nt, Artificial Sequence
  spacer sequence TTCN PAM
aaaucuguuuguguuuuaag

SEQ ID NO: 26020 - RNA, 20 nt, Artificial Sequence
  spacer sequence TTCN PAM
cugucuucaaaaucuguuug

SEQ ID NO: 26021 - RNA, 20 nt, Artificial Sequence
  spacer sequence TTCN PAM
caaguuucucugucuucaaa

SEQ ID NO: 26022 - RNA, 20 nt, Artificial Sequence
  spacer sequence TTCN PAM
auuggcuuaaaaauccaaau

SEQ ID NO: 26023 - RNA, 20 nt, Artificial Sequence
  spacer sequence TTCN PAM
auuuaaaucuccaaccugau

SEQ ID NO: 26024 - RNA, 20 nt, Artificial Sequence
  spacer sequence TTCN PAM
cuaccaaguuccagagcaac

SEQ ID NO: 26025 - RNA, 20 nt, Artificial Sequence
  spacer sequence TTCN PAM
agagcaacacucaauuuaug

SEQ ID NO: 26026 - RNA, 20 nt, Artificial Sequence
  spacer sequence TTCN PAM
auaugucccaccaggguaca

SEQ ID NO: 26027 - RNA, 20 nt, Artificial Sequence
  spacer sequence TTCN PAM
ucuuucuauaugucccacca

SEQ ID NO: 26028 - RNA, 20 nt, Artificial Sequence
  spacer sequence TTCN PAM
guucaucuuucuauaugucc

SEQ ID NO: 26029 - RNA, 20 nt, Artificial Sequence
  spacer sequence TTCN PAM
gacuggcuccaacucuuuca

SEQ ID NO: 26030 - RNA, 20 nt, Artificial Sequence
  spacer sequence TTCN PAM
aguccacauccaauccaccu

SEQ ID NO: 26031 - RNA, 20 nt, Artificial Sequence
  spacer sequence TTCN PAM
gguuucuuccuacuucuuua

SEQ ID NO: 26032 - RNA, 20 nt, Artificial Sequence
  spacer sequence TTCN PAM
cuagaagccaaagcaagaga

SEQ ID NO: 26033 - RNA, 20 nt, Artificial Sequence
  spacer sequence TTCN PAM
agagaauuauccucuucugg

SEQ ID NO: 26034 - RNA, 20 nt, Artificial Sequence
  spacer sequence TTCN PAM
agaaagcauucaucaucauc

SEQ ID NO: 26035 - RNA, 20 nt, Artificial Sequence
  spacer sequence TTCN PAM
ugaagcacucucuugcuuug

SEQ ID NO: 26036 - RNA, 20 nt, Artificial Sequence
  spacer sequence TTCN PAM
ucaucaucagugucaaaaau

SEQ ID NO: 26037 - RNA, 20 nt, Artificial Sequence
  spacer sequence TTCN PAM
cuccccuuggauuuuugaca

SEQ ID NO: 26038 - RNA, 20 nt, Artificial Sequence
  spacer sequence TTCN PAM
uucuggacuaauaaaaaugu

SEQ ID NO: 26039 - RNA, 20 nt, Artificial Sequence
  spacer sequence TTCN PAM
ggacuaauaaaaauguucua

SEQ ID NO: 26040 - RNA, 20 nt, Artificial Sequence
  spacer sequence TTCN PAM
aaaauugauuguggugauua

SEQ ID NO: 26041 - RNA, 20 nt, Artificial Sequence
  spacer sequence TTCN PAM
ggauauuaaucaccacaauc

SEQ ID NO: 26042 - RNA, 20 nt, Artificial Sequence
  spacer sequence TTCN PAM
guauauauucuggauauuaa

SEQ ID NO: 26043 - RNA, 20 nt, Artificial Sequence
  spacer sequence TTCN PAM
uacaaaugaacaacaacaaa

SEQ ID NO: 26044 - RNA, 20 nt, Artificial Sequence
  spacer sequence TTCN PAM
aaagaagauauacaaauggc

SEQ ID NO: 26045 - RNA, 20 nt, Artificial Sequence
  spacer sequence TTCN PAM
uuggaaaaauaauucaaguc

SEQ ID NO: 26046 - RNA, 20 nt, Artificial Sequence
  spacer sequence TTCN PAM
ugugcuuauuggccauuugu

SEQ ID NO: 26047 - RNA, 20 nt, Artificial Sequence
  spacer sequence TTCN PAM
aaugacuagugguguugagu

SEQ ID NO: 26048 - RNA, 20 nt, Artificial Sequence
  spacer sequence TTCN PAM
acugugugugugugugugug

SEQ ID NO: 26049 - RNA, 20 nt, Artificial Sequence
  spacer sequence TTCN PAM
gccuuaaaaacgaaggaaau

SEQ ID NO: 26050 - RNA, 20 nt, Artificial Sequence
  spacer sequence TTCN PAM
uuuuuaaggcugaauaauau

SEQ ID NO: 26051 - RNA, 20 nt, Artificial Sequence
  spacer sequence TTCN PAM
uucguuuuuaaggcugaaua

SEQ ID NO: 26052 - RNA, 20 nt, Artificial Sequence
  spacer sequence TTCN PAM
gacacaugcuauaacaugga

SEQ ID NO: 26053 - RNA, 20 nt, Artificial Sequence
  spacer sequence TTCN PAM
uuccucuccagccccuggca

SEQ ID NO: 26054 - RNA, 20 nt, Artificial Sequence
  spacer sequence TTCN PAM
acuuugcaaaaugaaaagag

SEQ ID NO: 26055 - RNA, 20 nt, Artificial Sequence
  spacer sequence TTCN PAM
uuuugcaaaguugaaacucu

SEQ ID NO: 26056 - RNA, 20 nt, Artificial Sequence
  spacer sequence TTCN PAM
ggagauugauggugggaaug

SEQ ID NO: 26057 - RNA, 20 nt, Artificial Sequence
  spacer sequence TTCN PAM
caccaucaaucuccagaaaa

SEQ ID NO: 26058 - RNA, 20 nt, Artificial Sequence
  spacer sequence TTCN PAM
auggcauuaaguacacucac

SEQ ID NO: 26059 - RNA, 20 nt, Artificial Sequence
  spacer sequence TTCN PAM
uggcuaaggccaggugcaau

SEQ ID NO: 26060 - RNA, 20 nt, Artificial Sequence
  spacer sequence TTCN PAM
auuuccuucaauuauugccu

SEQ ID NO: 26061 - RNA, 20 nt, Artificial Sequence
  spacer sequence TTCN PAM
cagaguuguacacccauccc

SEQ ID NO: 26062 - RNA, 20 nt, Artificial Sequence
  spacer sequence TTCN PAM
cauuuuaaaauauucacaga

SEQ ID NO: 26063 - RNA, 20 nt, Artificial Sequence
  spacer sequence TTCN PAM
guuuaaauggguguauugca

SEQ ID NO: 26064 - RNA, 20 nt, Artificial Sequence
  spacer sequence TTCN PAM
cauacuaugcaauacaccca

SEQ ID NO: 26065 - RNA, 20 nt, Artificial Sequence
  spacer sequence TTCN PAM
aagaaaacucagggauaguc

SEQ ID NO: 26066 - RNA, 20 nt, Artificial Sequence
  spacer sequence TTCN PAM
uugaaauggauuuauugaga

SEQ ID NO: 26067 - RNA, 20 nt, Artificial Sequence
  spacer sequence TTCN PAM
guggagugaugcagaaggaa

SEQ ID NO: 26068 - RNA, 20 nt, Artificial Sequence
  spacer sequence TTCN PAM
acuuugccaaggaucaaauc

SEQ ID NO: 26069 - RNA, 20 nt, Artificial Sequence
  spacer sequence TTCN PAM
cacucucaaucuucaacuuu

SEQ ID NO: 26070 - RNA, 20 nt, Artificial Sequence
  spacer sequence TTCN PAM
uucucacucucaaucuucaa

SEQ ID NO: 26071 - RNA, 20 nt, Artificial Sequence
  spacer sequence TTCN PAM
ccuuguguuaccaucuuccu

SEQ ID NO: 26072 - RNA, 20 nt, Artificial Sequence
  spacer sequence TTCN PAM
acagauuuccccuuguguua

SEQ ID NO: 26073 - RNA, 20 nt, Artificial Sequence
  spacer sequence TTCN PAM
cagcuuuccacagauuuccc

SEQ ID NO: 26074 - RNA, 20 nt, Artificial Sequence
  spacer sequence TTCN PAM
uaaaucccauguuauuaauu

SEQ ID NO: 26075 - RNA, 20 nt, Artificial Sequence
  spacer sequence TTCN PAM
aggaggcuacucuuuaguca

SEQ ID NO: 26076 - RNA, 20 nt, Artificial Sequence
  spacer sequence TTCN PAM
ggcaaaacaauuccuucuuu

SEQ ID NO: 26077 - RNA, 20 nt, Artificial Sequence
  spacer sequence TTCN PAM
cuuucauucaucacucacuc

SEQ ID NO: 26078 - RNA, 20 nt, Artificial Sequence
  spacer sequence TTCN PAM
uucaucacucacucagugac

SEQ ID NO: 26079 - RNA, 20 nt, Artificial Sequence
  spacer sequence TTCN PAM
ucacucacucagugacuuac

SEQ ID NO: 26080 - RNA, 20 nt, Artificial Sequence
  spacer sequence TTCN PAM
ugguaagugcccuauagagc

SEQ ID NO: 26081 - RNA, 20 nt, Artificial Sequence
  spacer sequence TTCN PAM
auguuuagauguguuuagau

SEQ ID NO: 26082 - RNA, 20 nt, Artificial Sequence
  spacer sequence TTCN PAM
guaugaucacaugcuauaca

SEQ ID NO: 26083 - RNA, 20 nt, Artificial Sequence
  spacer sequence TTCN PAM
cauuauccgcaacauaaacu

SEQ ID NO: 26084 - RNA, 20 nt, Artificial Sequence
  spacer sequence TTCN PAM
cuuuccuccuucuccccagc

SEQ ID NO: 26085 - RNA, 20 nt, Artificial Sequence
  spacer sequence TTCN PAM
uccuucuccccagccccugg

SEQ ID NO: 26086 - RNA, 20 nt, Artificial Sequence
  spacer sequence TTCN PAM
ccccagccccugguaaccuc

SEQ ID NO: 26087 - RNA, 20 nt, Artificial Sequence
  spacer sequence TTCN PAM
cagacacagaaaguggaaua

SEQ ID NO: 26088 - RNA, 20 nt, Artificial Sequence
  spacer sequence TTCN PAM
aggaaucucacauaaguaga

SEQ ID NO: 26089 - RNA, 20 nt, Artificial Sequence
  spacer sequence TTCN PAM
uagaauaggcaaauucacag

SEQ ID NO: 26090 - RNA, 20 nt, Artificial Sequence
  spacer sequence TTCN PAM
acuuaugugagauuccuaga

SEQ ID NO: 26091 - RNA, 20 nt, Artificial Sequence
  spacer sequence TTCN PAM
ucugugucugguuuauuuua

SEQ ID NO: 26092 - RNA, 20 nt, Artificial Sequence
  spacer sequence TTCN PAM
gugucugguuuauuuuacug

SEQ ID NO: 26093 - RNA, 20 nt, Artificial Sequence
  spacer sequence TTCN PAM
acagcggcugcaccauuuua

SEQ ID NO: 26094 - RNA, 20 nt, Artificial Sequence
  spacer sequence TTCN PAM
cacuggcaacacacaagguu

SEQ ID NO: 26095 - RNA, 20 nt, Artificial Sequence
  spacer sequence TTCN PAM
aguuucuccacauucucacc

SEQ ID NO: 26096 - RNA, 20 nt, Artificial Sequence
  spacer sequence TTCN PAM
ccacauucucaccaauacuu

SEQ ID NO: 26097 - RNA, 20 nt, Artificial Sequence
  spacer sequence TTCN PAM
uuuuugaaaaaacauauuau

SEQ ID NO: 26098 - RNA, 20 nt, Artificial Sequence
  spacer sequence TTCN PAM
aaaaagaaaauaacaaguau

SEQ ID NO: 26099 - RNA, 20 nt, Artificial Sequence
  spacer sequence TTCN PAM
uacuuacuaguauggcuaua

SEQ ID NO: 26100 - RNA, 20 nt, Artificial Sequence
  spacer sequence TTCN PAM
uguguuuauuggucauuugu

SEQ ID NO: 26101 - RNA, 20 nt, Artificial Sequence
  spacer sequence TTCN PAM
uugaaaaacugucuauucaa

SEQ ID NO: 26102 - RNA, 20 nt, Artificial Sequence
  spacer sequence TTCN PAM
aagaagauaauacaaaugac

SEQ ID NO: 26103 - RNA, 20 nt, Artificial Sequence
  spacer sequence TTCN PAM
aguucuuuugcccauuuuug

SEQ ID NO: 26104 - RNA, 20 nt, Artificial Sequence
  spacer sequence TTCN PAM
uuugcccauuuuugaauuga

SEQ ID NO: 26105 - RNA, 20 nt, Artificial Sequence
  spacer sequence TTCN PAM
uagacaccuuuuuuuuuugu

SEQ ID NO: 26106 - RNA, 20 nt, Artificial Sequence
  spacer sequence TTCN PAM
auauuuuauauuuuuguauu

SEQ ID NO: 26107 - RNA, 20 nt, Artificial Sequence
  spacer sequence TTCN PAM
caccaagcaugcagugacca

SEQ ID NO: 26108 - RNA, 20 nt, Artificial Sequence
  spacer sequence TTCN PAM
auuaccacaaacaacuucca

SEQ ID NO: 26109 - RNA, 20 nt, Artificial Sequence
  spacer sequence TTCN PAM
acguauagguuuguguaacc

SEQ ID NO: 26110 - RNA, 20 nt, Artificial Sequence
  spacer sequence TTCN PAM
gugcacuuuuguuccacgua

SEQ ID NO: 26111 - RNA, 20 nt, Artificial Sequence
  spacer sequence TTCN PAM
gaauuucacugacuguagcu

SEQ ID NO: 26112 - RNA, 20 nt, Artificial Sequence
  spacer sequence TTCN PAM
ugauagucacacugugcuua

SEQ ID NO: 26113 - RNA, 20 nt, Artificial Sequence
  spacer sequence TTCN PAM
guuuuuuuuuuuuagaugga

SEQ ID NO: 26114 - RNA, 20 nt, Artificial Sequence
  spacer sequence TTCN PAM
uguccucuuuucaguuuuuu

SEQ ID NO: 26115 - RNA, 20 nt, Artificial Sequence
  spacer sequence TTCN PAM
guucuuguccucuuuucagu

SEQ ID NO: 26116 - RNA, 20 nt, Artificial Sequence
  spacer sequence TTCN PAM
uaccuuucuguucuuguccu

SEQ ID NO: 26117 - RNA, 20 nt, Artificial Sequence
  spacer sequence TTCN PAM
gaacacugucacaacuucau

SEQ ID NO: 26118 - RNA, 20 nt, Artificial Sequence
  spacer sequence TTCN PAM
gaaaaaaaaugcagcuuaau

SEQ ID NO: 26119 - RNA, 20 nt, Artificial Sequence
  spacer sequence TTCN PAM
uacuaaauauacuucuggau

SEQ ID NO: 26120 - RNA, 20 nt, Artificial Sequence
  spacer sequence TTCN PAM
agaaaaucagcguuuuccau

SEQ ID NO: 26121 - RNA, 20 nt, Artificial Sequence
  spacer sequence TTCN PAM
agaaauacaaauuguaauca

SEQ ID NO: 26122 - RNA, 20 nt, Artificial Sequence
  spacer sequence TTCN PAM
auauccuauuaaauacaagc

SEQ ID NO: 26123 - RNA, 20 nt, Artificial Sequence
  spacer sequence TTCN PAM
auuuguuuuauuaaagacau

SEQ ID NO: 26124 - RNA, 20 nt, Artificial Sequence
  spacer sequence TTCN PAM
ucuuggcucugucaccccac

SEQ ID NO: 26125 - RNA, 20 nt, Artificial Sequence
  spacer sequence TTCN PAM
ccuuuucccaccccucuauu

SEQ ID NO: 26126 - RNA, 20 nt, Artificial Sequence
  spacer sequence TTCN PAM
caccccucuauuuuccuauu

SEQ ID NO: 26127 - RNA, 20 nt, Artificial Sequence
  spacer sequence TTCN PAM
uauucaucgugucauggaga

SEQ ID NO: 26128 - RNA, 20 nt, Artificial Sequence
  spacer sequence TTCN PAM
ucgugucauggagaaaugcu

SEQ ID NO: 26129 - RNA, 20 nt, Artificial Sequence
  spacer sequence TTCN PAM
ccaugacacgaugaauagga

SEQ ID NO: 26130 - RNA, 20 nt, Artificial Sequence
  spacer sequence TTCN PAM
acccagcaugguuccggugg

SEQ ID NO: 26131 - RNA, 20 nt, Artificial Sequence
  spacer sequence TTCN PAM
gguggagauaugaaucacca

SEQ ID NO: 26132 - RNA, 20 nt, Artificial Sequence
  spacer sequence TTCN PAM
uaucuccaccggaaccaugc

SEQ ID NO: 26133 - RNA, 20 nt, Artificial Sequence
  spacer sequence TTCN PAM
uguaguugcugcugauggug

SEQ ID NO: 26134 - RNA, 20 nt, Artificial Sequence
  spacer sequence TTCN PAM
uaaagggaguuacagaaaua

SEQ ID NO: 26135 - RNA, 20 nt, Artificial Sequence
  spacer sequence TTCN PAM
guaacucccuuuaagaaaca

SEQ ID NO: 26136 - RNA, 20 nt, Artificial Sequence
  spacer sequence TTCN PAM
auuucuguaacucccuuuaa

SEQ ID NO: 26137 - RNA, 20 nt, Artificial Sequence
  spacer sequence TTCN PAM
ggaugguugugacauauucu

SEQ ID NO: 26138 - RNA, 20 nt, Artificial Sequence
  spacer sequence TTCN PAM
gacuugaucaacacuugaag

SEQ ID NO: 26139 - RNA, 20 nt, Artificial Sequence
  spacer sequence TTCN PAM
aguguugaucaagucugaau

SEQ ID NO: 26140 - RNA, 20 nt, Artificial Sequence
  spacer sequence TTCN PAM
cuucaaguguugaucaaguc

SEQ ID NO: 26141 - RNA, 20 nt, Artificial Sequence
  spacer sequence TTCN PAM
uucccuucaaguguugauca

SEQ ID NO: 26142 - RNA, 20 nt, Artificial Sequence
  spacer sequence TTCN PAM
guggagacacuggaguaaau

SEQ ID NO: 26143 - RNA, 20 nt, Artificial Sequence
  spacer sequence TTCN PAM
ucucugucagauggagagau

SEQ ID NO: 26144 - RNA, 20 nt, Artificial Sequence
  spacer sequence TTCN PAM
ucucuccaucugacagagag

SEQ ID NO: 26145 - RNA, 20 nt, Artificial Sequence
  spacer sequence TTCN PAM
uccauuuccaaagaagguaa

SEQ ID NO: 26146 - RNA, 20 nt, Artificial Sequence
  spacer sequence TTCN PAM
auuuccaaagaagguaauua

SEQ ID NO: 26147 - RNA, 20 nt, Artificial Sequence
  spacer sequence TTCN PAM
aaagaagguaauuauuauga

SEQ ID NO: 26148 - RNA, 20 nt, Artificial Sequence
  spacer sequence TTCN PAM
uuggaaauggaagaauuuca

SEQ ID NO: 26149 - RNA, 20 nt, Artificial Sequence
  spacer sequence TTCN PAM
uaauaauuaccuucuuugga

SEQ ID NO: 26150 - RNA, 20 nt, Artificial Sequence
  spacer sequence TTCN PAM
agacccaggaggugagacac

SEQ ID NO: 26151 - RNA, 20 nt, Artificial Sequence
  spacer sequence TTCN PAM
gcggggagaaaccucucacc

SEQ ID NO: 26152 - RNA, 20 nt, Artificial Sequence
  spacer sequence TTCN PAM
ggcuuggugcuuuguuucuu

SEQ ID NO: 26153 - RNA, 20 nt, Artificial Sequence
  spacer sequence TTCN PAM
ugggagccuuuaaugaaaac

SEQ ID NO: 26154 - RNA, 20 nt, Artificial Sequence
  spacer sequence TTCN PAM
uuaaaggcucccaagaaaca

SEQ ID NO: 26155 - RNA, 20 nt, Artificial Sequence
  spacer sequence TTCN PAM
uugggauuuuaacauaaaua

SEQ ID NO: 26156 - RNA, 20 nt, Artificial Sequence
  spacer sequence TTCN PAM
uucugaauaaauuuaucaag

SEQ ID NO: 26157 - RNA, 20 nt, Artificial Sequence
  spacer sequence TTCN PAM
gaauaaauuuaucaagcaau

SEQ ID NO: 26158 - RNA, 20 nt, Artificial Sequence
  spacer sequence TTCN PAM
gaaggaaaauaaauuuauuu

SEQ ID NO: 26159 - RNA, 20 nt, Artificial Sequence
  spacer sequence TTCN PAM
ccugccucagccucccaagu

SEQ ID NO: 26160 - RNA, 20 nt, Artificial Sequence
  spacer sequence TTCN PAM
ggugugagccacugcaccug

SEQ ID NO: 26161 - RNA, 20 nt, Artificial Sequence
  spacer sequence TTCN PAM
uaaagggauaagagagaaac

SEQ ID NO: 26162 - RNA, 20 nt, Artificial Sequence
  spacer sequence TTCN PAM
cucuuaucccuuuaagaaua

SEQ ID NO: 26163 - RNA, 20 nt, Artificial Sequence
  spacer sequence TTCN PAM
ggaaaggcuuaaguucaguu

SEQ ID NO: 26164 - RNA, 20 nt, Artificial Sequence
  spacer sequence TTCN PAM
agaaagucucaaaaguuucu

SEQ ID NO: 26165 - RNA, 20 nt, Artificial Sequence
  spacer sequence TTCN PAM
guuccgccauuguaccuugg

SEQ ID NO: 26166 - RNA, 20 nt, Artificial Sequence
  spacer sequence TTCN PAM
gccauuguaccuuggcuucu

SEQ ID NO: 26167 - RNA, 20 nt, Artificial Sequence
  spacer sequence TTCN PAM
cuuugagaagggagacuuaa

SEQ ID NO: 26168 - RNA, 20 nt, Artificial Sequence
  spacer sequence TTCN PAM
caaagagaagccaagguaca

SEQ ID NO: 26169 - RNA, 20 nt, Artificial Sequence
  spacer sequence TTCN PAM
cauccccugacauagcuguc

SEQ ID NO: 26170 - RNA, 20 nt, Artificial Sequence
  spacer sequence TTCN PAM
aacuaaugagacagcuaugu

SEQ ID NO: 26171 - RNA, 20 nt, Artificial Sequence
  spacer sequence TTCN PAM
auguuccaacuaaugagaca

SEQ ID NO: 26172 - RNA, 20 nt, Artificial Sequence
  spacer sequence TTCN PAM
uuguaggcagaucuggccca

SEQ ID NO: 26173 - RNA, 20 nt, Artificial Sequence
  spacer sequence TTCN PAM
uaucaccaauguccucaugc

SEQ ID NO: 26174 - RNA, 20 nt, Artificial Sequence
  spacer sequence TTCN PAM
gaaugucauucgugcacauu

SEQ ID NO: 26175 - RNA, 20 nt, Artificial Sequence
  spacer sequence TTCN PAM
gaauugcaucuuuucuuauc

SEQ ID NO: 26176 - RNA, 20 nt, Artificial Sequence
  spacer sequence TTCN PAM
ugcacauuguaguugaagac

SEQ ID NO: 26177 - RNA, 20 nt, Artificial Sequence
  spacer sequence TTCN PAM
acuacaaugugcacgaauga

SEQ ID NO: 26178 - RNA, 20 nt, Artificial Sequence
  spacer sequence TTCN PAM
cuuuguuauuuaaguuacau

SEQ ID NO: 26179 - RNA, 20 nt, Artificial Sequence
  spacer sequence TTCN PAM
uccuuccaucuucauuuuac

SEQ ID NO: 26180 - RNA, 20 nt, Artificial Sequence
  spacer sequence TTCN PAM
uuccaucuucauuuuacaac

SEQ ID NO: 26181 - RNA, 20 nt, Artificial Sequence
  spacer sequence TTCN PAM
aucuucauuuuacaacagcu

SEQ ID NO: 26182 - RNA, 20 nt, Artificial Sequence
  spacer sequence TTCN PAM
uuuuacaacagcuccuuccc

SEQ ID NO: 26183 - RNA, 20 nt, Artificial Sequence
  spacer sequence TTCN PAM
cuugaguaauccaccucaca

SEQ ID NO: 26184 - RNA, 20 nt, Artificial Sequence
  spacer sequence TTCN PAM
ugcuuuccuuagauggaggc

SEQ ID NO: 26185 - RNA, 20 nt, Artificial Sequence
  spacer sequence TTCN PAM
gaaaggacccaguccuggaa

SEQ ID NO: 26186 - RNA, 20 nt, Artificial Sequence
  spacer sequence TTCN PAM
gaacacaaccaacagugcug

SEQ ID NO: 26187 - RNA, 20 nt, Artificial Sequence
  spacer sequence TTCN PAM
aggacuggguccuuucagaa

SEQ ID NO: 26188 - RNA, 20 nt, Artificial Sequence
  spacer sequence TTCN PAM
auuccaggacuggguccuuu

SEQ ID NO: 26189 - RNA, 20 nt, Artificial Sequence
  spacer sequence TTCN PAM
auagaagaagaaauuucaag

SEQ ID NO: 26190 - RNA, 20 nt, Artificial Sequence
  spacer sequence TTCN PAM
auugaauaaguacaagugcu

SEQ ID NO: 26191 - RNA, 20 nt, Artificial Sequence
  spacer sequence TTCN PAM
ucuauugaauaaguacaagu

SEQ ID NO: 26192 - RNA, 20 nt, Artificial Sequence
  spacer sequence TTCN PAM
ucuucuauugaauaaguaca

SEQ ID NO: 26193 - RNA, 20 nt, Artificial Sequence
  spacer sequence TTCN PAM
aggcuuaauuagugcagaug

SEQ ID NO: 26194 - RNA, 20 nt, Artificial Sequence
  spacer sequence TTCN PAM
ucugcacuaauuaagccuug

SEQ ID NO: 26195 - RNA, 20 nt, Artificial Sequence
  spacer sequence TTCN PAM
ucaucugcacuaauuaagcc

SEQ ID NO: 26196 - RNA, 20 nt, Artificial Sequence
  spacer sequence TTCN PAM
guuuuuagucaaagcugaug

SEQ ID NO: 26197 - RNA, 20 nt, Artificial Sequence
  spacer sequence TTCN PAM
uucauucaacaaauaugcau

SEQ ID NO: 26198 - RNA, 20 nt, Artificial Sequence
  spacer sequence TTCN PAM
uucaacaaauaugcauugag

SEQ ID NO: 26199 - RNA, 20 nt, Artificial Sequence
  spacer sequence TTCN PAM
acaaauaugcauugagugcc

SEQ ID NO: 26200 - RNA, 20 nt, Artificial Sequence
  spacer sequence TTCN PAM
caguauguaacacaguaccu

SEQ ID NO: 26201 - RNA, 20 nt, Artificial Sequence
  spacer sequence TTCN PAM
gugcuuauucucaguaugua

SEQ ID NO: 26202 - RNA, 20 nt, Artificial Sequence
  spacer sequence TTCN PAM
uggucaacagcacguaucac

SEQ ID NO: 26203 - RNA, 20 nt, Artificial Sequence
  spacer sequence TTCN PAM
uuuuuuuaucuugcuuguac

SEQ ID NO: 26204 - RNA, 20 nt, Artificial Sequence
  spacer sequence TTCN PAM
aaagaaaaacgcucacugcc

SEQ ID NO: 26205 - RNA, 20 nt, Artificial Sequence
  spacer sequence TTCN PAM
uuugaaaauuuaccuuuucc

SEQ ID NO: 26206 - RNA, 20 nt, Artificial Sequence
  spacer sequence TTCN PAM
auuuuaaaauagccuucuga

SEQ ID NO: 26207 - RNA, 20 nt, Artificial Sequence
  spacer sequence TTCN PAM
cuggucaguugaaggucagg

SEQ ID NO: 26208 - RNA, 20 nt, Artificial Sequence
  spacer sequence TTCN PAM
acugaccagugaaaaagagu

SEQ ID NO: 26209 - RNA, 20 nt, Artificial Sequence
  spacer sequence TTCN PAM
agccugaccuucaacugacc

SEQ ID NO: 26210 - RNA, 20 nt, Artificial Sequence
  spacer sequence TTCN PAM
gguugccucauucugucuuu

SEQ ID NO: 26211 - RNA, 20 nt, Artificial Sequence
  spacer sequence TTCN PAM
gucuuuuaaaccaugacaga

SEQ ID NO: 26212 - RNA, 20 nt, Artificial Sequence
  spacer sequence TTCN PAM
gucaugguuuaaaagacaga

SEQ ID NO: 26213 - RNA, 20 nt, Artificial Sequence
  spacer sequence TTCN PAM
aucacccaugaguccuuacu

SEQ ID NO: 26214 - RNA, 20 nt, Artificial Sequence
  spacer sequence TTCN PAM
cccugcaggaccuuggcaca

SEQ ID NO: 26215 - RNA, 20 nt, Artificial Sequence
  spacer sequence TTCN PAM
ugucaagucuugugugugcc

SEQ ID NO: 26216 - RNA, 20 nt, Artificial Sequence
  spacer sequence TTCN PAM
cgugugaaucuuugugggga

SEQ ID NO: 26217 - RNA, 20 nt, Artificial Sequence
  spacer sequence TTCN PAM
cacgugaagucucaucucag

SEQ ID NO: 26218 - RNA, 20 nt, Artificial Sequence
  spacer sequence TTCN PAM
uugcuccccacaaagauuca

SEQ ID NO: 26219 - RNA, 20 nt, Artificial Sequence
  spacer sequence TTCN PAM
agagaguucacacuuugagc

SEQ ID NO: 26220 - RNA, 20 nt, Artificial Sequence
  spacer sequence TTCN PAM
cacuuugagcaacauugugg

SEQ ID NO: 26221 - RNA, 20 nt, Artificial Sequence
  spacer sequence TTCN PAM
ccacaauguugcucaaagug

SEQ ID NO: 26222 - RNA, 20 nt, Artificial Sequence
  spacer sequence TTCN PAM
cauggucaccagccagcccu

SEQ ID NO: 26223 - RNA, 20 nt, Artificial Sequence
  spacer sequence TTCN PAM
augacaauuaacaguaaagg

SEQ ID NO: 26224 - RNA, 20 nt, Artificial Sequence
  spacer sequence TTCN PAM
uuuuaauaauaacauaauug

SEQ ID NO: 26225 - RNA, 20 nt, Artificial Sequence
  spacer sequence TTCN PAM
ggugcacagagacagggcag

SEQ ID NO: 26226 - RNA, 20 nt, Artificial Sequence
  spacer sequence TTCN PAM
aauaaugcccccguuuuuac

SEQ ID NO: 26227 - RNA, 20 nt, Artificial Sequence
  spacer sequence TTCN PAM
aagugcuuggggugugugug

SEQ ID NO: 26228 - RNA, 20 nt, Artificial Sequence
  spacer sequence TTCN PAM
gccucucagaugaucauggc

SEQ ID NO: 26229 - RNA, 20 nt, Artificial Sequence
  spacer sequence TTCN PAM
uuauagcaaugugagaaugg

SEQ ID NO: 26230 - RNA, 20 nt, Artificial Sequence
  spacer sequence TTCN PAM
cacauugcuauaaggaacua

SEQ ID NO: 26231 - RNA, 20 nt, Artificial Sequence
  spacer sequence TTCN PAM
cccaaugcauuaguccauuc

SEQ ID NO: 26232 - RNA, 20 nt, Artificial Sequence
  spacer sequence TTCN PAM
aaugaguuucacccaaugca

SEQ ID NO: 26233 - RNA, 20 nt, Artificial Sequence
  spacer sequence TTCN PAM
ugucucugcucuugucuugc

SEQ ID NO: 26234 - RNA, 20 nt, Artificial Sequence
  spacer sequence TTCN PAM
accaauagucaguuuccugu

SEQ ID NO: 26235 - RNA, 20 nt, Artificial Sequence
  spacer sequence TTCN PAM
uuccuuuaaaaugaggcuau

SEQ ID NO: 26236 - RNA, 20 nt, Artificial Sequence
  spacer sequence TTCN PAM
uuuaaaaugaggcuauuacc

SEQ ID NO: 26237 - RNA, 20 nt, Artificial Sequence
  spacer sequence TTCN PAM
caaaacugggguaauagccu

SEQ ID NO: 26238 - RNA, 20 nt, Artificial Sequence
  spacer sequence TTCN PAM
guuauugucccuuguaauuc

SEQ ID NO: 26239 - RNA, 20 nt, Artificial Sequence
  spacer sequence TTCN PAM
uacaucuauaaucccuuuaa

SEQ ID NO: 26240 - RNA, 20 nt, Artificial Sequence
  spacer sequence TTCN PAM
ccuuauuaaggguaagagua

SEQ ID NO: 26241 - RNA, 20 nt, Artificial Sequence
  spacer sequence TTCN PAM
cagucuggaauauuuguauu

SEQ ID NO: 26242 - RNA, 20 nt, Artificial Sequence
  spacer sequence TTCN PAM
agacugagaacaucuccuuu

SEQ ID NO: 26243 - RNA, 20 nt, Artificial Sequence
  spacer sequence TTCN PAM
gugcuaaagccagaacagac

SEQ ID NO: 26244 - RNA, 20 nt, Artificial Sequence
  spacer sequence TTCN PAM
ggcuuuagcacugaaaacac

SEQ ID NO: 26245 - RNA, 20 nt, Artificial Sequence
  spacer sequence TTCN PAM
augucuguucuggcuuuagc

SEQ ID NO: 26246 - RNA, 20 nt, Artificial Sequence
  spacer sequence TTCN PAM
ccuguuccuguucaacucuc

SEQ ID NO: 26247 - RNA, 20 nt, Artificial Sequence
  spacer sequence TTCN PAM
uguucaacucucuuaauucc

SEQ ID NO: 26248 - RNA, 20 nt, Artificial Sequence
  spacer sequence TTCN PAM
acucucuuaauuccauuagc

SEQ ID NO: 26249 - RNA, 20 nt, Artificial Sequence
  spacer sequence TTCN PAM
uauuucuuacagaguguuaa

SEQ ID NO: 26250 - RNA, 20 nt, Artificial Sequence
  spacer sequence TTCN PAM
uacagaguguuaauaaaccu

SEQ ID NO: 26251 - RNA, 20 nt, Artificial Sequence
  spacer sequence TTCN PAM
uagguuuauuaacacucugu

SEQ ID NO: 26252 - RNA, 20 nt, Artificial Sequence
  spacer sequence TTCN PAM
gcucccuugguaccccuaau

SEQ ID NO: 26253 - RNA, 20 nt, Artificial Sequence
  spacer sequence TTCN PAM
ucugcucccuugguaccccu

SEQ ID NO: 26254 - RNA, 20 nt, Artificial Sequence
  spacer sequence TTCN PAM
cuuucauucuguuucuccuc

SEQ ID NO: 26255 - RNA, 20 nt, Artificial Sequence
  spacer sequence TTCN PAM
uucuguuucuccucccagcc

SEQ ID NO: 26256 - RNA, 20 nt, Artificial Sequence
  spacer sequence TTCN PAM
guuucuccucccagccuccu

SEQ ID NO: 26257 - RNA, 20 nt, Artificial Sequence
  spacer sequence TTCN PAM
ccucccagccuccuguuacc

SEQ ID NO: 26258 - RNA, 20 nt, Artificial Sequence
  spacer sequence TTCN PAM
gaagaccugugaguugaaca

SEQ ID NO: 26259 - RNA, 20 nt, Artificial Sequence
  spacer sequence TTCN PAM
gaaagauggguaacaggagg

SEQ ID NO: 26260 - RNA, 20 nt, Artificial Sequence
  spacer sequence TTCN PAM
acucacaggucuucugaaag

SEQ ID NO: 26261 - RNA, 20 nt, Artificial Sequence
  spacer sequence TTCN PAM
guuggccaguguugagugug

SEQ ID NO: 26262 - RNA, 20 nt, Artificial Sequence
  spacer sequence TTCN PAM
ccaaccacagauaugcaaga

SEQ ID NO: 26263 - RNA, 20 nt, Artificial Sequence
  spacer sequence TTCN PAM
ugcauaucugugguuggaga

SEQ ID NO: 26264 - RNA, 20 nt, Artificial Sequence
  spacer sequence TTCN PAM
aagugucaguggagagcaua

SEQ ID NO: 26265 - RNA, 20 nt, Artificial Sequence
  spacer sequence TTCN PAM
acugagcacaaacuugggag

SEQ ID NO: 26266 - RNA, 20 nt, Artificial Sequence
  spacer sequence TTCN PAM
ucagguaaaugccuugauua

SEQ ID NO: 26267 - RNA, 20 nt, Artificial Sequence
  spacer sequence TTCN PAM
uucaucagguaaaugccuug

SEQ ID NO: 26268 - RNA, 20 nt, Artificial Sequence
  spacer sequence TTCN PAM
cccucuucauucaucaggua

SEQ ID NO: 26269 - RNA, 20 nt, Artificial Sequence
  spacer sequence TTCN PAM
ucccccucuucauucaucag

SEQ ID NO: 26270 - RNA, 20 nt, Artificial Sequence
  spacer sequence TTCN PAM
aauacaucuagcacauuccc

SEQ ID NO: 26271 - RNA, 20 nt, Artificial Sequence
  spacer sequence TTCN PAM
cauuaagccacggaacuugc

SEQ ID NO: 26272 - RNA, 20 nt, Artificial Sequence
  spacer sequence TTCN PAM
guggcuuaaugggaaugugc

SEQ ID NO: 26273 - RNA, 20 nt, Artificial Sequence
  spacer sequence TTCN PAM
cuugugcaaggcugcacuug

SEQ ID NO: 26274 - RNA, 20 nt, Artificial Sequence
  spacer sequence TTCN PAM
ugaaauuaucaaaaaugaaa

SEQ ID NO: 26275 - RNA, 20 nt, Artificial Sequence
  spacer sequence TTCN PAM
ugaaaaaaagcgcuguauug

SEQ ID NO: 26276 - RNA, 20 nt, Artificial Sequence
  spacer sequence TTCN PAM
uuuuugauaauuucaugaaa

SEQ ID NO: 26277 - RNA, 20 nt, Artificial Sequence
  spacer sequence TTCN PAM
uuucauuuuugauaauuuca

SEQ ID NO: 26278 - RNA, 20 nt, Artificial Sequence
  spacer sequence TTCN PAM
aauucauuucauuuuugaua

SEQ ID NO: 26279 - RNA, 20 nt, Artificial Sequence
  spacer sequence TTCN PAM
uucaaauucauuucauuuuu

SEQ ID NO: 26280 - RNA, 20 nt, Artificial Sequence
  spacer sequence TTCN PAM
ccuaggauauucuuucaaau

SEQ ID NO: 26281 - RNA, 20 nt, Artificial Sequence
  spacer sequence TTCN PAM
acuacuuaacaagaagaggu

SEQ ID NO: 26282 - RNA, 20 nt, Artificial Sequence
  spacer sequence TTCN PAM
uguuaaguaguugaaugucu

SEQ ID NO: 26283 - RNA, 20 nt, Artificial Sequence
  spacer sequence TTCN PAM
caaaauaauaaacgaggguc

SEQ ID NO: 26284 - RNA, 20 nt, Artificial Sequence
  spacer sequence TTCN PAM
ugccaauaauucaguagcau

SEQ ID NO: 26285 - RNA, 20 nt, Artificial Sequence
  spacer sequence TTCN PAM
guagcauuuacgucuccauu

SEQ ID NO: 26286 - RNA, 20 nt, Artificial Sequence
  spacer sequence TTCN PAM
caggcaggagauuccauggc

SEQ ID NO: 26287 - RNA, 20 nt, Artificial Sequence
  spacer sequence TTCN PAM
auggcuaauggccagucccu

SEQ ID NO: 26288 - RNA, 20 nt, Artificial Sequence
  spacer sequence TTCN PAM
aaugccaaacucaagauaca

SEQ ID NO: 26289 - RNA, 20 nt, Artificial Sequence
  spacer sequence TTCN PAM
cacugagcccagagucaagu

SEQ ID NO: 26290 - RNA, 20 nt, Artificial Sequence
  spacer sequence TTCN PAM
gcacaggagaucucuaacuu

SEQ ID NO: 26291 - RNA, 20 nt, Artificial Sequence
  spacer sequence TTCN PAM
auuauucugcaauauagcag

SEQ ID NO: 26292 - RNA, 20 nt, Artificial Sequence
  spacer sequence TTCN PAM
gcaauauagcagaguaaaau

SEQ ID NO: 26293 - RNA, 20 nt, Artificial Sequence
  spacer sequence TTCN PAM
uuuaggcuguguguuuuuug

SEQ ID NO: 26294 - RNA, 20 nt, Artificial Sequence
  spacer sequence TTCN PAM
gaccaugcuggcugcauauu

SEQ ID NO: 26295 - RNA, 20 nt, Artificial Sequence
  spacer sequence TTCN PAM
gaaaagcuuuugauaagcau

SEQ ID NO: 26296 - RNA, 20 nt, Artificial Sequence
  spacer sequence TTCN PAM
gaauaugcagccagcauggu

SEQ ID NO: 26297 - RNA, 20 nt, Artificial Sequence
  spacer sequence TTCN PAM
uaucgaaaaggugcugcacc

SEQ ID NO: 26298 - RNA, 20 nt, Artificial Sequence
  spacer sequence TTCN PAM
auaugaaaacgugccugugc

SEQ ID NO: 26299 - RNA, 20 nt, Artificial Sequence
  spacer sequence TTCN PAM
aaaggugcagcaccuuuucg

SEQ ID NO: 26300 - RNA, 20 nt, Artificial Sequence
  spacer sequence TTCN PAM
uucagggguacuuuauaagc

SEQ ID NO: 26301 - RNA, 20 nt, Artificial Sequence
  spacer sequence TTCN PAM
gggguacuuuauaagcaaua

SEQ ID NO: 26302 - RNA, 20 nt, Artificial Sequence
  spacer sequence TTCN PAM
agauucaaacauuagucccc

SEQ ID NO: 26303 - RNA, 20 nt, Artificial Sequence
  spacer sequence TTCN PAM
aacauuaguccccaguuuua

SEQ ID NO: 26304 - RNA, 20 nt, Artificial Sequence
  spacer sequence TTCN PAM
ccuaaaacuggggacuaaug

SEQ ID NO: 26305 - RNA, 20 nt, Artificial Sequence
  spacer sequence TTCN PAM
aaguguaccccccagaaaga

SEQ ID NO: 26306 - RNA, 20 nt, Artificial Sequence
  spacer sequence TTCN PAM
gggggguacacuuugaaaua

SEQ ID NO: 26307 - RNA, 20 nt, Artificial Sequence
  spacer sequence TTCN PAM
caaaacagggaaagcucauu

SEQ ID NO: 26308 - RNA, 20 nt, Artificial Sequence
  spacer sequence TTCN PAM
cuguuuugagaacagguauc

SEQ ID NO: 26309 - RNA, 20 nt, Artificial Sequence
  spacer sequence TTCN PAM
caguuuaaagaaaacaaaga

SEQ ID NO: 26310 - RNA, 20 nt, Artificial Sequence
  spacer sequence TTCN PAM
uuaaacugugaaaugagcuu

SEQ ID NO: 26311 - RNA, 20 nt, Artificial Sequence
  spacer sequence TTCN PAM
uuguuuucuuuaaacuguga

SEQ ID NO: 26312 - RNA, 20 nt, Artificial Sequence
  spacer sequence TTCN PAM
uuucuuuguuuucuuuaaac

SEQ ID NO: 26313 - RNA, 20 nt, Artificial Sequence
  spacer sequence TTCN PAM
aggcuggagggaaggucccu

SEQ ID NO: 26314 - RNA, 20 nt, Artificial Sequence
  spacer sequence TTCN PAM
cuccagccuugaagggagag

SEQ ID NO: 26315 - RNA, 20 nt, Artificial Sequence
  spacer sequence TTCN PAM
cuugccagagggaccuuccc

SEQ ID NO: 26316 - RNA, 20 nt, Artificial Sequence
  spacer sequence TTCN PAM
acccacuggcugaugcucaa

SEQ ID NO: 26317 - RNA, 20 nt, Artificial Sequence
  spacer sequence TTCN PAM
acuauuaggacauaaucacu

SEQ ID NO: 26318 - RNA, 20 nt, Artificial Sequence
  spacer sequence TTCN PAM
gcuuugaucccuguuaaaau

SEQ ID NO: 26319 - RNA, 20 nt, Artificial Sequence
  spacer sequence TTCN PAM
uccucgguggacuguaaagg

SEQ ID NO: 26320 - RNA, 20 nt, Artificial Sequence
  spacer sequence TTCN PAM
cuaagcuuuggagggcagau

SEQ ID NO: 26321 - RNA, 20 nt, Artificial Sequence
  spacer sequence TTCN PAM
uagguggacggauuucuaca

SEQ ID NO: 26322 - RNA, 20 nt, Artificial Sequence
  spacer sequence TTCN PAM
uagauucuuagguggacgga

SEQ ID NO: 26323 - RNA, 20 nt, Artificial Sequence
  spacer sequence TTCN PAM
gcuaaugcuuuucuuagauu

SEQ ID NO: 26324 - RNA, 20 nt, Artificial Sequence
  spacer sequence TTCN PAM
acugaaagauaauucaaaug

SEQ ID NO: 26325 - RNA, 20 nt, Artificial Sequence
  spacer sequence TTCN PAM
guagaaugauagcuuguccc

SEQ ID NO: 26326 - RNA, 20 nt, Artificial Sequence
  spacer sequence TTCN PAM
aauguuggggcuuguucugc

SEQ ID NO: 26327 - RNA, 20 nt, Artificial Sequence
  spacer sequence TTCN PAM
gcaauaaaauauaauggcua

SEQ ID NO: 26328 - RNA, 20 nt, Artificial Sequence
  spacer sequence TTCN PAM
gccuuucuguucuaacuuua

SEQ ID NO: 26329 - RNA, 20 nt, Artificial Sequence
  spacer sequence TTCN PAM
guucuaacuuuaacuaagga

SEQ ID NO: 26330 - RNA, 20 nt, Artificial Sequence
  spacer sequence TTCN PAM
aacuuuaacuaaggaaaaaa

SEQ ID NO: 26331 - RNA, 20 nt, Artificial Sequence
  spacer sequence TTCN PAM
uuaguuaaaguuagaacaga

SEQ ID NO: 26332 - RNA, 20 nt, Artificial Sequence
  spacer sequence TTCN PAM
uaaauugcauaguauauaaa

SEQ ID NO: 26333 - RNA, 20 nt, Artificial Sequence
  spacer sequence TTCN PAM
guuuucuuccccuugacauu

SEQ ID NO: 26334 - RNA, 20 nt, Artificial Sequence
  spacer sequence TTCN PAM
uccccuugacauuuacaaaa

SEQ ID NO: 26335 - RNA, 20 nt, Artificial Sequence
  spacer sequence TTCN PAM
ccuugacauuuacaaaauuc

SEQ ID NO: 26336 - RNA, 20 nt, Artificial Sequence
  spacer sequence TTCN PAM
uuuggaagagugggaucuac

SEQ ID NO: 26337 - RNA, 20 nt, Artificial Sequence
  spacer sequence TTCN PAM
aaaugaauuuuguaaauguc

SEQ ID NO: 26338 - RNA, 20 nt, Artificial Sequence
  spacer sequence TTCN PAM
uuaaaaauacaugauuuauc

SEQ ID NO: 26339 - RNA, 20 nt, Artificial Sequence
  spacer sequence TTCN PAM
ccuauugauauucauuaaaa

SEQ ID NO: 26340 - RNA, 20 nt, Artificial Sequence
  spacer sequence TTCN PAM
cuagccagagagguaguguu

SEQ ID NO: 26341 - RNA, 20 nt, Artificial Sequence
  spacer sequence TTCN PAM
uuaaaucauuaaaacagccu

SEQ ID NO: 26342 - RNA, 20 nt, Artificial Sequence
  spacer sequence TTCN PAM
auagccuuaaaaugauuagu

SEQ ID NO: 26343 - RNA, 20 nt, Artificial Sequence
  spacer sequence TTCN PAM
uaaacacuaaucauuuuaag

SEQ ID NO: 26344 - RNA, 20 nt, Artificial Sequence
  spacer sequence TTCN PAM
auuugaugguaaguuuaaau

SEQ ID NO: 26345 - RNA, 20 nt, Artificial Sequence
  spacer sequence TTCN PAM
aaacacaguggaaaaaaaaa

SEQ ID NO: 26346 - RNA, 20 nt, Artificial Sequence
  spacer sequence TTCN PAM
acuguguuuugaaggguuag

SEQ ID NO: 26347 - RNA, 20 nt, Artificial Sequence
  spacer sequence TTCN PAM
agcaguuagcuggcugggau

SEQ ID NO: 26348 - RNA, 20 nt, Artificial Sequence
  spacer sequence TTCN PAM
uuuauguuuagcuacaguau

SEQ ID NO: 26349 - RNA, 20 nt, Artificial Sequence
  spacer sequence TTCN PAM
ucuucccuuucuacgacuag

SEQ ID NO: 26350 - RNA, 20 nt, Artificial Sequence
  spacer sequence TTCN PAM
cuuucuacgacuaggaaggg

SEQ ID NO: 26351 - RNA, 20 nt, Artificial Sequence
  spacer sequence TTCN PAM
acgacuaggaaggggaggga

SEQ ID NO: 26352 - RNA, 20 nt, Artificial Sequence
  spacer sequence TTCN PAM
uagucguagaaagggaagau

SEQ ID NO: 26353 - RNA, 20 nt, Artificial Sequence
  spacer sequence TTCN PAM
cccaucuccucuccucuccc

SEQ ID NO: 26354 - RNA, 20 nt, Artificial Sequence
  spacer sequence TTCN PAM
auuucauauguugggcuaua

SEQ ID NO: 26355 - RNA, 20 nt, Artificial Sequence
  spacer sequence TTCN PAM
uauguugggcuauaaggaau

SEQ ID NO: 26356 - RNA, 20 nt, Artificial Sequence
  spacer sequence TTCN PAM
uuauagcccaacauaugaaa

SEQ ID NO: 26357 - RNA, 20 nt, Artificial Sequence
  spacer sequence TTCN PAM
cuaguucaggucuaaagugg

SEQ ID NO: 26358 - RNA, 20 nt, Artificial Sequence
  spacer sequence TTCN PAM
ggucuaaagugggcaucugu

SEQ ID NO: 26359 - RNA, 20 nt, Artificial Sequence
  spacer sequence TTCN PAM
cccaaauguagacagaugcc

SEQ ID NO: 26360 - RNA, 20 nt, Artificial Sequence
  spacer sequence TTCN PAM
agaagagaaggaggggaaaa

SEQ ID NO: 26361 - RNA, 20 nt, Artificial Sequence
  spacer sequence TTCN PAM
agaaaccuagagcuucuccc

SEQ ID NO: 26362 - RNA, 20 nt, Artificial Sequence
  spacer sequence TTCN PAM
cuucuagaaaccuagagcuu

SEQ ID NO: 26363 - RNA, 20 nt, Artificial Sequence
  spacer sequence TTCN PAM
ccuccuucucuucuagaaac

SEQ ID NO: 26364 - RNA, 20 nt, Artificial Sequence
  spacer sequence TTCN PAM
ugaccacacugcucaaaccu

SEQ ID NO: 26365 - RNA, 20 nt, Artificial Sequence
  spacer sequence TTCN PAM
gcaaagaagacugaggcaga

SEQ ID NO: 26366 - RNA, 20 nt, Artificial Sequence
  spacer sequence TTCN PAM
uugcagaaagccucccugac

SEQ ID NO: 26367 - RNA, 20 nt, Artificial Sequence
  spacer sequence TTCN PAM
ccagggaaagugaucugaga

SEQ ID NO: 26368 - RNA, 20 nt, Artificial Sequence
  spacer sequence TTCN PAM
cuggugaaaagccaucugcc

SEQ ID NO: 26369 - RNA, 20 nt, Artificial Sequence
  spacer sequence TTCN PAM
uuuggaguaaggagcuggcu

SEQ ID NO: 26370 - RNA, 20 nt, Artificial Sequence
  spacer sequence TTCN PAM
uucuuuuggaguaaggagcu

SEQ ID NO: 26371 - RNA, 20 nt, Artificial Sequence
  spacer sequence TTCN PAM
gugugugugugcugugaccu

SEQ ID NO: 26372 - RNA, 20 nt, Artificial Sequence
  spacer sequence TTCN PAM
gcaauauccucgugggugac

SEQ ID NO: 26373 - RNA, 20 nt, Artificial Sequence
  spacer sequence TTCN PAM
gauaaugguuucguaacauu

SEQ ID NO: 26374 - RNA, 20 nt, Artificial Sequence
  spacer sequence TTCN PAM
ucugauaaugguuucguaac

SEQ ID NO: 26375 - RNA, 20 nt, Artificial Sequence
  spacer sequence TTCN PAM
aaguuaaacagaccucccag

SEQ ID NO: 26376 - RNA, 20 nt, Artificial Sequence
  spacer sequence TTCN PAM
aaaguucaaaguuaaacaga

SEQ ID NO: 26377 - RNA, 20 nt, Artificial Sequence
  spacer sequence TTCN PAM
gaguuagaaacagggaaaga

SEQ ID NO: 26378 - RNA, 20 nt, Artificial Sequence
  spacer sequence TTCN PAM
aacucagaauacacucagca

SEQ ID NO: 26379 - RNA, 20 nt, Artificial Sequence
  spacer sequence TTCN PAM
cuguuucuaacucagaauac

SEQ ID NO: 26380 - RNA, 20 nt, Artificial Sequence
  spacer sequence TTCN PAM
uuaagucuuucccuguuucu

SEQ ID NO: 26381 - RNA, 20 nt, Artificial Sequence
  spacer sequence TTCN PAM
ucugacauccauuuucuuua

SEQ ID NO: 26382 - RNA, 20 nt, Artificial Sequence
  spacer sequence TTCN PAM
uuggauacucacccaccuuc

SEQ ID NO: 26383 - RNA, 20 nt, Artificial Sequence
  spacer sequence TTCN PAM
cuaaaugaggccacucaccc

SEQ ID NO: 26384 - RNA, 20 nt, Artificial Sequence
  spacer sequence TTCN PAM
uuacucagagcugucgcugu

SEQ ID NO: 26385 - RNA, 20 nt, Artificial Sequence
  spacer sequence TTCN PAM
ugggccuugggggcaagaau

SEQ ID NO: 26386 - RNA, 20 nt, Artificial Sequence
  spacer sequence TTCN PAM
ugcccccaaggcccaagaau

SEQ ID NO: 26387 - RNA, 20 nt, Artificial Sequence
  spacer sequence TTCN PAM
caaagacaaggaguaguaau

SEQ ID NO: 26388 - RNA, 20 nt, Artificial Sequence
  spacer sequence TTCN PAM
ucucccuucccaaagacaag

SEQ ID NO: 26389 - RNA, 20 nt, Artificial Sequence
  spacer sequence TTCN PAM
agaugagccauugucaucua

SEQ ID NO: 26390 - RNA, 20 nt, Artificial Sequence
  spacer sequence TTCN PAM
uuagaugacaauggcucauc

SEQ ID NO: 26391 - RNA, 20 nt, Artificial Sequence
  spacer sequence TTCN PAM
uggcauguguuggguacucc

SEQ ID NO: 26392 - RNA, 20 nt, Artificial Sequence
  spacer sequence TTCN PAM
ucuuuucucucucucucugu

SEQ ID NO: 26393 - RNA, 20 nt, Artificial Sequence
  spacer sequence TTCN PAM
caccacgagaauaguauggg

SEQ ID NO: 26394 - RNA, 20 nt, Artificial Sequence
  spacer sequence TTCN PAM
acuuuugcaucuuccucauu

SEQ ID NO: 26395 - RNA, 20 nt, Artificial Sequence
  spacer sequence TTCN PAM
ucauucucucuuugccugcu

SEQ ID NO: 26396 - RNA, 20 nt, Artificial Sequence
  spacer sequence TTCN PAM
cucuuugccugcugccaucc

SEQ ID NO: 26397 - RNA, 20 nt, Artificial Sequence
  spacer sequence TTCN PAM
aucuuacauggauggcagca

SEQ ID NO: 26398 - RNA, 20 nt, Artificial Sequence
  spacer sequence TTCN PAM
ccuccuugccuuccaucaug

SEQ ID NO: 26399 - RNA, 20 nt, Artificial Sequence
  spacer sequence TTCN PAM
cuagccguguggaacuguga

SEQ ID NO: 26400 - RNA, 20 nt, Artificial Sequence
  spacer sequence TTCN PAM
acacggcuagggaagccuca

SEQ ID NO: 26401 - RNA, 20 nt, Artificial Sequence
  spacer sequence TTCN PAM
uuuguaaauugcccagucuc

SEQ ID NO: 26402 - RNA, 20 nt, Artificial Sequence
  spacer sequence TTCN PAM
gaguccuuuuugcaaaggug

SEQ ID NO: 26403 - RNA, 20 nt, Artificial Sequence
  spacer sequence TTCN PAM
acacccaaauacgugcaugc

SEQ ID NO: 26404 - RNA, 20 nt, Artificial Sequence
  spacer sequence TTCN PAM
uccacucccccaaccuaccc

SEQ ID NO: 26405 - RNA, 20 nt, Artificial Sequence
  spacer sequence TTCN PAM
cucugucucucuguuaauga

SEQ ID NO: 26406 - RNA, 20 nt, Artificial Sequence
  spacer sequence TTCN PAM
ccucaagaggcacaugucag

SEQ ID NO: 26407 - RNA, 20 nt, Artificial Sequence
  spacer sequence TTCN PAM
agguucaccucaagaggcac

SEQ ID NO: 26408 - RNA, 20 nt, Artificial Sequence
  spacer sequence TTCN PAM
uguaagccacccaaaucucc

SEQ ID NO: 26409 - RNA, 20 nt, Artificial Sequence
  spacer sequence TTCN PAM
ugauggaaagaaaaaaagaa

SEQ ID NO: 26410 - RNA, 20 nt, Artificial Sequence
  spacer sequence TTCN PAM
aucaagaauuacauauuugg

SEQ ID NO: 26411 - RNA, 20 nt, Artificial Sequence
  spacer sequence TTCN PAM
uuccaucaagaauuacauau

SEQ ID NO: 26412 - RNA, 20 nt, Artificial Sequence
  spacer sequence TTCN PAM
uuuuuucuuuccaucaagaa

SEQ ID NO: 26413 - RNA, 20 nt, Artificial Sequence
  spacer sequence TTCN PAM
aauuggaggauauugcauau

SEQ ID NO: 26414 - RNA, 20 nt, Artificial Sequence
  spacer sequence TTCN PAM
gacucuguuuuugagcacug

SEQ ID NO: 26415 - RNA, 20 nt, Artificial Sequence
  spacer sequence TTCN PAM
ugaaacagcugcugcugauu

SEQ ID NO: 26416 - RNA, 20 nt, Artificial Sequence
  spacer sequence TTCN PAM
agaacacagugcucaaaaac

SEQ ID NO: 26417 - RNA, 20 nt, Artificial Sequence
  spacer sequence TTCN PAM
gaauucugacccuacuuguu

SEQ ID NO: 26418 - RNA, 20 nt, Artificial Sequence
  spacer sequence TTCN PAM
gaaucagcagcagcuguuuc

SEQ ID NO: 26419 - RNA, 20 nt, Artificial Sequence
  spacer sequence TTCN PAM
gacccuacuuguuauuugcu

SEQ ID NO: 26420 - RNA, 20 nt, Artificial Sequence
  spacer sequence TTCN PAM
gcugugccucugagagcauu

SEQ ID NO: 26421 - RNA, 20 nt, Artificial Sequence
  spacer sequence TTCN PAM
guaaucacaaauccaguugu

SEQ ID NO: 26422 - RNA, 20 nt, Artificial Sequence
  spacer sequence TTCN PAM
guuaaaacaacuggauuugu

SEQ ID NO: 26423 - RNA, 20 nt, Artificial Sequence
  spacer sequence TTCN PAM
uauuuucuguuaaaacaacu

SEQ ID NO: 26424 - RNA, 20 nt, Artificial Sequence
  spacer sequence TTCN PAM
gcauaaaacuucauauuuuc

SEQ ID NO: 26425 - RNA, 20 nt, Artificial Sequence
  spacer sequence TTCN PAM
aaauuuuaaaaccugucuuc

SEQ ID NO: 26426 - RNA, 20 nt, Artificial Sequence
  spacer sequence TTCN PAM
cauaaagcuuucuaaauuuu

SEQ ID NO: 26427 - RNA, 20 nt, Artificial Sequence
  spacer sequence TTCN PAM
aagagcggggaaucccauaa

SEQ ID NO: 26428 - RNA, 20 nt, Artificial Sequence
  spacer sequence TTCN PAM
ccgcucuuugaaaaucacag

SEQ ID NO: 26429 - RNA, 20 nt, Artificial Sequence
  spacer sequence TTCN PAM
acuuuaaauuccgucgucuc

SEQ ID NO: 26430 - RNA, 20 nt, Artificial Sequence
  spacer sequence TTCN PAM
gucgucuccuggcgagugga

SEQ ID NO: 26431 - RNA, 20 nt, Artificial Sequence
  spacer sequence TTCN PAM
acucgccaggagacgacgga

SEQ ID NO: 26432 - RNA, 20 nt, Artificial Sequence
  spacer sequence TTCN PAM
auuuuggguccaaaaccgcu

SEQ ID NO: 26433 - RNA, 20 nt, Artificial Sequence
  spacer sequence TTCN PAM
uguaugugcaaagccacuug

SEQ ID NO: 26434 - RNA, 20 nt, Artificial Sequence
  spacer sequence TTCN PAM
aguggcuuugcacauacagg

SEQ ID NO: 26435 - RNA, 20 nt, Artificial Sequence
  spacer sequence TTCN PAM
aauagguccuggcugggagu

SEQ ID NO: 26436 - RNA, 20 nt, Artificial Sequence
  spacer sequence TTCN PAM
gggaucauuuccaauagguc

SEQ ID NO: 26437 - RNA, 20 nt, Artificial Sequence
  spacer sequence TTCN PAM
ccuuugucccaacuuucugg

SEQ ID NO: 26438 - RNA, 20 nt, Artificial Sequence
  spacer sequence TTCN PAM
cagcaggagagaaagugccu

SEQ ID NO: 26439 - RNA, 20 nt, Artificial Sequence
  spacer sequence TTCN PAM
cuccugcugagaaauuaaca

SEQ ID NO: 26440 - RNA, 20 nt, Artificial Sequence
  spacer sequence TTCN PAM
gaugauucauuucaaguggg

SEQ ID NO: 26441 - RNA, 20 nt, Artificial Sequence
  spacer sequence TTCN PAM
uuucaagugggcugaaaaca

SEQ ID NO: 26442 - RNA, 20 nt, Artificial Sequence
  spacer sequence TTCN PAM
agugggcugaaaacaagugg

SEQ ID NO: 26443 - RNA, 20 nt, Artificial Sequence
  spacer sequence TTCN PAM
gcccacuugaaaugaaucau

SEQ ID NO: 26444 - RNA, 20 nt, Artificial Sequence
  spacer sequence TTCN PAM
ggccuuaccggcagggacug

SEQ ID NO: 26445 - RNA, 20 nt, Artificial Sequence
  spacer sequence TTCN PAM
ccuacaaaaggguaaucaua

SEQ ID NO: 26446 - RNA, 20 nt, Artificial Sequence
  spacer sequence TTCN PAM
cagucucuuggcuuucuccu

SEQ ID NO: 26447 - RNA, 20 nt, Artificial Sequence
  spacer sequence TTCN PAM
aaccccaauugauaauggca

SEQ ID NO: 26448 - RNA, 20 nt, Artificial Sequence
  spacer sequence TTCN PAM
ccaagauuauacucugauua

SEQ ID NO: 26449 - RNA, 20 nt, Artificial Sequence
  spacer sequence TTCN PAM
gcuucuccaagauuauacuc

SEQ ID NO: 26450 - RNA, 20 nt, Artificial Sequence
  spacer sequence TTCN PAM
ccuaacaguguacuacauaa

SEQ ID NO: 26451 - RNA, 20 nt, Artificial Sequence
  spacer sequence TTCN PAM
agacuuucuccuaacagugu

SEQ ID NO: 26452 - RNA, 20 nt, Artificial Sequence
  spacer sequence TTCN PAM
gugagcuugauugauguggg

SEQ ID NO: 26453 - RNA, 20 nt, Artificial Sequence
  spacer sequence TTCN PAM
gugugcccagaccuguucua

SEQ ID NO: 26454 - RNA, 20 nt, Artificial Sequence
  spacer sequence TTCN PAM
aggagcuugaaggcaauaaa

SEQ ID NO: 26455 - RNA, 20 nt, Artificial Sequence
  spacer sequence TTCN PAM
gagucgacuggcaggaucuu

SEQ ID NO: 26456 - RNA, 20 nt, Artificial Sequence
  spacer sequence TTCN PAM
ucugagucgacuggcaggau

SEQ ID NO: 26457 - RNA, 20 nt, Artificial Sequence
  spacer sequence TTCN PAM
ucaucaauaaagcaauuaca

SEQ ID NO: 26458 - RNA, 20 nt, Artificial Sequence
  spacer sequence TTCN PAM
cucacuaacuaguugaagca

SEQ ID NO: 26459 - RNA, 20 nt, Artificial Sequence
  spacer sequence TTCN PAM
acuaguuagugagagaauua

SEQ ID NO: 26460 - RNA, 20 nt, Artificial Sequence
  spacer sequence TTCN PAM
ucuaugcuacuguuuuggug

SEQ ID NO: 26461 - RNA, 20 nt, Artificial Sequence
  spacer sequence TTCN PAM
cuuucaucuaugcuacuguu

SEQ ID NO: 26462 - RNA, 20 nt, Artificial Sequence
  spacer sequence TTCN PAM
caauauaaauguagaccguu

SEQ ID NO: 26463 - RNA, 20 nt, Artificial Sequence
  spacer sequence TTCN PAM
aucuuguugcuccauuauuc

SEQ ID NO: 26464 - RNA, 20 nt, Artificial Sequence
  spacer sequence TTCN PAM
uaauacacagcuucuaucuc

SEQ ID NO: 26465 - RNA, 20 nt, Artificial Sequence
  spacer sequence TTCN PAM
aucucaugguccaacauggc

SEQ ID NO: 26466 - RNA, 20 nt, Artificial Sequence
  spacer sequence TTCN PAM
ggaaugcgugcauacuuuuc

SEQ ID NO: 26467 - RNA, 20 nt, Artificial Sequence
  spacer sequence TTCN PAM
agaaauuacuuuuuuuaugu

SEQ ID NO: 26468 - RNA, 20 nt, Artificial Sequence
  spacer sequence TTCN PAM
cuuuaaggacacuuccuugg

SEQ ID NO: 26469 - RNA, 20 nt, Artificial Sequence
  spacer sequence TTCN PAM
uuggaguuacacacacuucu

SEQ ID NO: 26470 - RNA, 20 nt, Artificial Sequence
  spacer sequence TTCN PAM
uaugcuugcaaccuauuggu

SEQ ID NO: 26471 - RNA, 20 nt, Artificial Sequence
  spacer sequence TTCN PAM
aaccaauagguugcaagcau

SEQ ID NO: 26472 - RNA, 20 nt, Artificial Sequence
  spacer sequence TTCN PAM
uaccauacauuuccuccucu

SEQ ID NO: 26473 - RNA, 20 nt, Artificial Sequence
  spacer sequence TTCN PAM
gugguaaguaguuucuuacc

SEQ ID NO: 26474 - RNA, 20 nt, Artificial Sequence
  spacer sequence TTCN PAM
uuugaggaagacuguggaac

SEQ ID NO: 26475 - RNA, 20 nt, Artificial Sequence
  spacer sequence TTCN PAM
ucaaaggaacuugaguucug

SEQ ID NO: 26476 - RNA, 20 nt, Artificial Sequence
  spacer sequence TTCN PAM
acagucuuccucaaaggaac

SEQ ID NO: 26477 - RNA, 20 nt, Artificial Sequence
  spacer sequence TTCN PAM
cugggaguuccacagucuuc

SEQ ID NO: 26478 - RNA, 20 nt, Artificial Sequence
  spacer sequence TTCN PAM
agugacuucacugggaguuc

SEQ ID NO: 26479 - RNA, 20 nt, Artificial Sequence
  spacer sequence TTCN PAM
guaacuugcuugaugucaug

SEQ ID NO: 26480 - RNA, 20 nt, Artificial Sequence
  spacer sequence TTCN PAM
gguugcaagugauagaggcc

SEQ ID NO: 26481 - RNA, 20 nt, Artificial Sequence
  spacer sequence TTCN PAM
aauuagcuuacauuaaaaag

SEQ ID NO: 26482 - RNA, 20 nt, Artificial Sequence
  spacer sequence TTCN PAM
gacaugccuaaagcuggaca

SEQ ID NO: 26483 - RNA, 20 nt, Artificial Sequence
  spacer sequence TTCN PAM
cucugggacuggcaucauuc

SEQ ID NO: 26484 - RNA, 20 nt, Artificial Sequence
  spacer sequence TTCN PAM
caggcagguucucuuuucaa

SEQ ID NO: 26485 - RNA, 20 nt, Artificial Sequence
  spacer sequence TTCN PAM
guuguguuaugguuugaguu

SEQ ID NO: 26486 - RNA, 20 nt, Artificial Sequence
  spacer sequence TTCN PAM
ucccuuaguauaguacuuac

SEQ ID NO: 26487 - RNA, 20 nt, Artificial Sequence
  spacer sequence TTCN PAM
ugccaggucccugccugaca

SEQ ID NO: 26488 - RNA, 20 nt, Artificial Sequence
  spacer sequence TTCN PAM
gcauggguugugauuccugc

SEQ ID NO: 26489 - RNA, 20 nt, Artificial Sequence
  spacer sequence TTCN PAM
gucagaugcuucugcauggg

SEQ ID NO: 26490 - RNA, 20 nt, Artificial Sequence
  spacer sequence TTCN PAM
ggagaaagccucugaggacc

SEQ ID NO: 26491 - RNA, 20 nt, Artificial Sequence
  spacer sequence TTCN PAM
ccagaaacacgacaugacua

SEQ ID NO: 26492 - RNA, 20 nt, Artificial Sequence
  spacer sequence TTCN PAM
uaguaugccugaagacaaau

SEQ ID NO: 26493 - RNA, 20 nt, Artificial Sequence
  spacer sequence TTCN PAM
ggcauacuaagaauaacuuu

SEQ ID NO: 26494 - RNA, 20 nt, Artificial Sequence
  spacer sequence TTCN PAM
gauuugucuucaggcauacu

SEQ ID NO: 26495 - RNA, 20 nt, Artificial Sequence
  spacer sequence TTCN PAM
uauggacuuucugauuuguc

SEQ ID NO: 26496 - RNA, 20 nt, Artificial Sequence
  spacer sequence TTCN PAM
aaaagucuccauuggugauc

SEQ ID NO: 26497 - RNA, 20 nt, Artificial Sequence
  spacer sequence TTCN PAM
ucacccucaaaaagucugug

SEQ ID NO: 26498 - RNA, 20 nt, Artificial Sequence
  spacer sequence TTCN PAM
gcagagcaugcgacacauac

SEQ ID NO: 26499 - RNA, 20 nt, Artificial Sequence
  spacer sequence TTCN PAM
gaaggcugaggaaugucuac

SEQ ID NO: 26500 - RNA, 20 nt, Artificial Sequence
  spacer sequence TTCN PAM
gaaagcugguuucagcagag

SEQ ID NO: 26501 - RNA, 20 nt, Artificial Sequence
  spacer sequence TTCN PAM
ucagccuucagaaagcuggu

SEQ ID NO: 26502 - RNA, 20 nt, Artificial Sequence
  spacer sequence TTCN PAM
guagacauuccucagccuuc

SEQ ID NO: 26503 - RNA, 20 nt, Artificial Sequence
  spacer sequence TTCN PAM
uugcuuuacauuuuaagaca

SEQ ID NO: 26504 - RNA, 20 nt, Artificial Sequence
  spacer sequence TTCN PAM
gaucauggugagauucaaua

SEQ ID NO: 26505 - RNA, 20 nt, Artificial Sequence
  spacer sequence TTCN PAM
auaauuuuauuuauuuauuu

SEQ ID NO: 26506 - RNA, 20 nt, Artificial Sequence
  spacer sequence TTCN PAM
cauagacaguucacccucca

SEQ ID NO: 26507 - RNA, 20 nt, Artificial Sequence
  spacer sequence TTCN PAM
cccuccagggccccacccuc

SEQ ID NO: 26508 - RNA, 20 nt, Artificial Sequence
  spacer sequence TTCN PAM
aaguaaaaauagaggguggg

SEQ ID NO: 26509 - RNA, 20 nt, Artificial Sequence
  spacer sequence TTCN PAM
cuacaccucacagcugggau

SEQ ID NO: 26510 - RNA, 20 nt, Artificial Sequence
  spacer sequence TTCN PAM
gugcucaaaucccagcugug

SEQ ID NO: 26511 - RNA, 20 nt, Artificial Sequence
  spacer sequence TTCN PAM
uauaagugauaugcaucuca

SEQ ID NO: 26512 - RNA, 20 nt, Artificial Sequence
  spacer sequence TTCN PAM
uaucauucuuauaagugaua

SEQ ID NO: 26513 - RNA, 20 nt, Artificial Sequence
  spacer sequence TTCN PAM
ugcuauucuuaucauucuua

SEQ ID NO: 26514 - RNA, 20 nt, Artificial Sequence
  spacer sequence TTCN PAM
uuuugguuuuugucaucaca

SEQ ID NO: 26515 - RNA, 20 nt, Artificial Sequence
  spacer sequence TTCN PAM
ucaccuauaaaaaggaagug

SEQ ID NO: 26516 - RNA, 20 nt, Artificial Sequence
  spacer sequence TTCN PAM
uuuuuauaggugaggaaaca

SEQ ID NO: 26517 - RNA, 20 nt, Artificial Sequence
  spacer sequence TTCN PAM
uugaacacuuauuaauaagu

SEQ ID NO: 26518 - RNA, 20 nt, Artificial Sequence
  spacer sequence TTCN PAM
aagaaauuugcuuuaaaaaa

SEQ ID NO: 26519 - RNA, 20 nt, Artificial Sequence
  spacer sequence TTCN PAM
gcccccaaaacauuuccccc

SEQ ID NO: 26520 - RNA, 20 nt, Artificial Sequence
  spacer sequence TTCN PAM
cccaucuguguuugauuaac

SEQ ID NO: 26521 - RNA, 20 nt, Artificial Sequence
  spacer sequence TTCN PAM
acggugccucuuggccuagu

SEQ ID NO: 26522 - RNA, 20 nt, Artificial Sequence
  spacer sequence TTCN PAM
uguuuaauuuuuuuuguuaa

SEQ ID NO: 26523 - RNA, 20 nt, Artificial Sequence
  spacer sequence TTCN PAM
gaugaguagccgggacucag

SEQ ID NO: 26524 - RNA, 20 nt, Artificial Sequence
  spacer sequence TTCN PAM
gagucccggcuacucaucag

SEQ ID NO: 26525 - RNA, 20 nt, Artificial Sequence
  spacer sequence TTCN PAM
aaacucuaucagaacuugac

SEQ ID NO: 26526 - RNA, 20 nt, Artificial Sequence
  spacer sequence TTCN PAM
gauagaguuuugaaaucucc

SEQ ID NO: 26527 - RNA, 20 nt, Artificial Sequence
  spacer sequence TTCN PAM
cccgaggggaccaaaaccau

SEQ ID NO: 26528 - RNA, 20 nt, Artificial Sequence
  spacer sequence TTCN PAM
gaucauguagcauauauuuu

SEQ ID NO: 26529 - RNA, 20 nt, Artificial Sequence
  spacer sequence TTCN PAM
caauacuggcaaauuuuugu

SEQ ID NO: 26530 - RNA, 20 nt, Artificial Sequence
  spacer sequence TTCN PAM
aaugauuccaaaaucaagcu

SEQ ID NO: 26531 - RNA, 20 nt, Artificial Sequence
  spacer sequence TTCN PAM
aaaaucaagcucgcugaaua

SEQ ID NO: 26532 - RNA, 20 nt, Artificial Sequence
  spacer sequence TTCN PAM
gcgagcuugauuuuggaauc

SEQ ID NO: 26533 - RNA, 20 nt, Artificial Sequence
  spacer sequence TTCN PAM
aaaagagggccacaaacauu

SEQ ID NO: 26534 - RNA, 20 nt, Artificial Sequence
  spacer sequence TTCN PAM
gguuugacccguacauaaug

SEQ ID NO: 26535 - RNA, 20 nt, Artificial Sequence
  spacer sequence TTCN PAM
aaauucggguuugacccgua

SEQ ID NO: 26536 - RNA, 20 nt, Artificial Sequence
  spacer sequence TTCN PAM
auucuaaauucggguuugac

SEQ ID NO: 26537 - RNA, 20 nt, Artificial Sequence
  spacer sequence TTCN PAM
cccuuucaauucuaaauucg

SEQ ID NO: 26538 - RNA, 20 nt, Artificial Sequence
  spacer sequence TTCN PAM
gaccccucccaccacuguuc

SEQ ID NO: 26539 - RNA, 20 nt, Artificial Sequence
  spacer sequence TTCN PAM
gggacaccagacuuuucuuc

SEQ ID NO: 26540 - RNA, 20 nt, Artificial Sequence
  spacer sequence TTCN PAM
ucucaggaaacucugcaacc

SEQ ID NO: 26541 - RNA, 20 nt, Artificial Sequence
  spacer sequence TTCN PAM
caggaaacucugcaaccagg

SEQ ID NO: 26542 - RNA, 20 nt, Artificial Sequence
  spacer sequence TTCN PAM
ugagaagaaaagucuggugu

SEQ ID NO: 26543 - RNA, 20 nt, Artificial Sequence
  spacer sequence TTCN PAM
auauugcguugugauuuuug

SEQ ID NO: 26544 - RNA, 20 nt, Artificial Sequence
  spacer sequence TTCN PAM
uuaugaggguuuagaggacu

SEQ ID NO: 26545 - RNA, 20 nt, Artificial Sequence
  spacer sequence TTCN PAM
cucacauucuaucagauaaa

SEQ ID NO: 26546 - RNA, 20 nt, Artificial Sequence
  spacer sequence TTCN PAM
aucagauaaauccuaacugg

SEQ ID NO: 26547 - RNA, 20 nt, Artificial Sequence
  spacer sequence TTCN PAM
caguguguugugcucucacc

SEQ ID NO: 26548 - RNA, 20 nt, Artificial Sequence
  spacer sequence TTCN PAM
agcuccaacaucuugcaguu

SEQ ID NO: 26549 - RNA, 20 nt, Artificial Sequence
  spacer sequence TTCN PAM
uucccagaugagauuuuauu

SEQ ID NO: 26550 - RNA, 20 nt, Artificial Sequence
  spacer sequence TTCN PAM
cagaugagauuuuauuuugc

SEQ ID NO: 26551 - RNA, 20 nt, Artificial Sequence
  spacer sequence TTCN PAM
ggagguaugagugcaaaaua

SEQ ID NO: 26552 - RNA, 20 nt, Artificial Sequence
  spacer sequence TTCN PAM
gucuguaggauggaguuucc

SEQ ID NO: 26553 - RNA, 20 nt, Artificial Sequence
  spacer sequence TTCN PAM
caauguguauuucaaggaac

SEQ ID NO: 26554 - RNA, 20 nt, Artificial Sequence
  spacer sequence TTCN PAM
aggaacacuguuugcuuggu

SEQ ID NO: 26555 - RNA, 20 nt, Artificial Sequence
  spacer sequence TTCN PAM
uugaaauacacauugggaaa

SEQ ID NO: 26556 - RNA, 20 nt, Artificial Sequence
  spacer sequence TTCN PAM
aaaccuaugaccauggaccu

SEQ ID NO: 26557 - RNA, 20 nt, Artificial Sequence
  spacer sequence TTCN PAM
ucauguaagggcuucucaga

SEQ ID NO: 26558 - RNA, 20 nt, Artificial Sequence
  spacer sequence TTCN PAM
uguaagggcuucucagagcc

SEQ ID NO: 26559 - RNA, 20 nt, Artificial Sequence
  spacer sequence TTCN PAM
cagagccauucaaaugcuga

SEQ ID NO: 26560 - RNA, 20 nt, Artificial Sequence
  spacer sequence TTCN PAM
aaugcugaugcauuccauga

SEQ ID NO: 26561 - RNA, 20 nt, Artificial Sequence
  spacer sequence TTCN PAM
uguuuggggaaaagcauuug

SEQ ID NO: 26562 - RNA, 20 nt, Artificial Sequence
  spacer sequence TTCN PAM
ccaaacaagaaggagaccca

SEQ ID NO: 26563 - RNA, 20 nt, Artificial Sequence
  spacer sequence TTCN PAM
uuagcacaaaaaccaaaugc

SEQ ID NO: 26564 - RNA, 20 nt, Artificial Sequence
  spacer sequence TTCN PAM
uuauuguaguuuucugacuc

SEQ ID NO: 26565 - RNA, 20 nt, Artificial Sequence
  spacer sequence TTCN PAM
gacuccucuccuacuguuuu

SEQ ID NO: 26566 - RNA, 20 nt, Artificial Sequence
  spacer sequence TTCN PAM
aaaugccuaaaacaguagga

SEQ ID NO: 26567 - RNA, 20 nt, Artificial Sequence
  spacer sequence TTCN PAM
gaauauaagucucaaaauac

SEQ ID NO: 26568 - RNA, 20 nt, Artificial Sequence
  spacer sequence TTCN PAM
gaaauguuagaggcagagga

SEQ ID NO: 26569 - RNA, 20 nt, Artificial Sequence
  spacer sequence TTCN PAM
aaucaggcccuggauuuuac

SEQ ID NO: 26570 - RNA, 20 nt, Artificial Sequence
  spacer sequence TTCN PAM
ucugaaaguaacaagcauuc

SEQ ID NO: 26571 - RNA, 20 nt, Artificial Sequence
  spacer sequence TTCN PAM
gaggaacccaugcuauguaa

SEQ ID NO: 26572 - RNA, 20 nt, Artificial Sequence
  spacer sequence TTCN PAM
ccuuaugagggauuuccaaa

SEQ ID NO: 26573 - RNA, 20 nt, Artificial Sequence
  spacer sequence TTCN PAM
aaauuuagaaaugcaaaaua

SEQ ID NO: 26574 - RNA, 20 nt, Artificial Sequence
  spacer sequence TTCN PAM
aaauuuggaaaucccucaua

SEQ ID NO: 26575 - RNA, 20 nt, Artificial Sequence
  spacer sequence TTCN PAM
aaaccagacguuauucuuaa

SEQ ID NO: 26576 - RNA, 20 nt, Artificial Sequence
  spacer sequence TTCN PAM
uaagaaucacagaagaguca

SEQ ID NO: 26577 - RNA, 20 nt, Artificial Sequence
  spacer sequence TTCN PAM
uaagaauaacgucugguuuu

SEQ ID NO: 26578 - RNA, 20 nt, Artificial Sequence
  spacer sequence TTCN PAM
gugauucuuaagaauaacgu

SEQ ID NO: 26579 - RNA, 20 nt, Artificial Sequence
  spacer sequence TTCN PAM
caccucccuuuaaccccucc

SEQ ID NO: 26580 - RNA, 20 nt, Artificial Sequence
  spacer sequence TTCN PAM
cgcccuguuggagggguuaa

SEQ ID NO: 26581 - RNA, 20 nt, Artificial Sequence
  spacer sequence TTCN PAM
agugguaagaauuauauuug

SEQ ID NO: 26582 - RNA, 20 nt, Artificial Sequence
  spacer sequence TTCN PAM
uaccacuggaaagcaaggcc

SEQ ID NO: 26583 - RNA, 20 nt, Artificial Sequence
  spacer sequence TTCN PAM
gagacaucugucauggcagc

SEQ ID NO: 26584 - RNA, 20 nt, Artificial Sequence
  spacer sequence TTCN PAM
cagggagcuaacuuuagcag

SEQ ID NO: 26585 - RNA, 20 nt, Artificial Sequence
  spacer sequence TTCN PAM
gcaucugcuggcggaguuug

SEQ ID NO: 26586 - RNA, 20 nt, Artificial Sequence
  spacer sequence TTCN PAM
caauggcugacucucucucg

SEQ ID NO: 26587 - RNA, 20 nt, Artificial Sequence
  spacer sequence TTCN PAM
caggauauauuaaauguccu

SEQ ID NO: 26588 - RNA, 20 nt, Artificial Sequence
  spacer sequence TTCN PAM
uaacguguaagcuauuuuua

SEQ ID NO: 26589 - RNA, 20 nt, Artificial Sequence
  spacer sequence TTCN PAM
uccaaguuaacaagcagucc

SEQ ID NO: 26590 - RNA, 20 nt, Artificial Sequence
  spacer sequence TTCN PAM
gacuucaaaauaaauaaaaa

SEQ ID NO: 26591 - RNA, 20 nt, Artificial Sequence
  spacer sequence TTCN PAM
aaauaaauaaaaaagauuuu

SEQ ID NO: 26592 - RNA, 20 nt, Artificial Sequence
  spacer sequence TTCN PAM
auaacucagauuucuccucu

SEQ ID NO: 26593 - RNA, 20 nt, Artificial Sequence
  spacer sequence TTCN PAM
ccucugggcaggccagcaaa

SEQ ID NO: 26594 - RNA, 20 nt, Artificial Sequence
  spacer sequence TTCN PAM
ccaaauaaagucuuucuuuc

SEQ ID NO: 26595 - RNA, 20 nt, Artificial Sequence
  spacer sequence TTCN PAM
uucauaggcucccugacucu

SEQ ID NO: 26596 - RNA, 20 nt, Artificial Sequence
  spacer sequence TTCN PAM
uaggcucccugacucuccca

SEQ ID NO: 26597 - RNA, 20 nt, Artificial Sequence
  spacer sequence TTCN PAM
cuuguacuuaaucuccucaa

SEQ ID NO: 26598 - RNA, 20 nt, Artificial Sequence
  spacer sequence TTCN PAM
aauauguccacaauuucuuu

SEQ ID NO: 26599 - RNA, 20 nt, Artificial Sequence
  spacer sequence TTCN PAM
uuaacacuucucucuucaaa

SEQ ID NO: 26600 - RNA, 20 nt, Artificial Sequence
  spacer sequence TTCN PAM
cucuucaaaaggcggaguuu

SEQ ID NO: 26601 - RNA, 20 nt, Artificial Sequence
  spacer sequence TTCN PAM
aaaggcggaguuucauuacc

SEQ ID NO: 26602 - RNA, 20 nt, Artificial Sequence
  spacer sequence TTCN PAM
uuaccuuccccucacaugug

SEQ ID NO: 26603 - RNA, 20 nt, Artificial Sequence
  spacer sequence TTCN PAM
aacaaacagcgaaaugaugu

SEQ ID NO: 26604 - RNA, 20 nt, Artificial Sequence
  spacer sequence TTCN PAM
cuguuuguuagaaguuuauc

SEQ ID NO: 26605 - RNA, 20 nt, Artificial Sequence
  spacer sequence TTCN PAM
aaggcugguuuauaaaaagc

SEQ ID NO: 26606 - RNA, 20 nt, Artificial Sequence
  spacer sequence TTCN PAM
ccugccucagccucccaagc

SEQ ID NO: 26607 - RNA, 20 nt, Artificial Sequence
  spacer sequence TTCN PAM
agcaauucuccugccucagc

SEQ ID NO: 26608 - RNA, 20 nt, Artificial Sequence
  spacer sequence TTCN PAM
uggagcccuaacacugcacu

SEQ ID NO: 26609 - RNA, 20 nt, Artificial Sequence
  spacer sequence TTCN PAM
uuucuguggggaggcugcca

SEQ ID NO: 26610 - RNA, 20 nt, Artificial Sequence
  spacer sequence TTCN PAM
guggggaggcugccaccacg

SEQ ID NO: 26611 - RNA, 20 nt, Artificial Sequence
  spacer sequence TTCN PAM
uuuauuuguacaggaaugcu

SEQ ID NO: 26612 - RNA, 20 nt, Artificial Sequence
  spacer sequence TTCN PAM
uaaaaaguuucuuggccccu

SEQ ID NO: 26613 - RNA, 20 nt, Artificial Sequence
  spacer sequence TTCN PAM
uggccccuauaacaaugaga

SEQ ID NO: 26614 - RNA, 20 nt, Artificial Sequence
  spacer sequence TTCN PAM
cugaguggggaaguucucaa

SEQ ID NO: 26615 - RNA, 20 nt, Artificial Sequence
  spacer sequence TTCN PAM
ccacucagagaaagagucau

SEQ ID NO: 26616 - RNA, 20 nt, Artificial Sequence
  spacer sequence TTCN PAM
caaguuuuaaucuuaauagc

SEQ ID NO: 26617 - RNA, 20 nt, Artificial Sequence
  spacer sequence TTCN PAM
aagauaaguauguacaugug

SEQ ID NO: 26618 - RNA, 20 nt, Artificial Sequence
  spacer sequence TTCN PAM
aaaaagggcccaucuggaga

SEQ ID NO: 26619 - RNA, 20 nt, Artificial Sequence
  spacer sequence TTCN PAM
uuccaaaaagggcccaucug

SEQ ID NO: 26620 - RNA, 20 nt, Artificial Sequence
  spacer sequence TTCN PAM
aaauccucacaaaugcauug

SEQ ID NO: 26621 - RNA, 20 nt, Artificial Sequence
  spacer sequence TTCN PAM
cccaaugaccacagaacccc

SEQ ID NO: 26622 - RNA, 20 nt, Artificial Sequence
  spacer sequence TTCN PAM
cuacuauuggacuucuccag

SEQ ID NO: 26623 - RNA, 20 nt, Artificial Sequence
  spacer sequence TTCN PAM
ccaggccuuuaauauggaau

SEQ ID NO: 26624 - RNA, 20 nt, Artificial Sequence
  spacer sequence TTCN PAM
auauuaaaggccuggagaag

SEQ ID NO: 26625 - RNA, 20 nt, Artificial Sequence
  spacer sequence TTCN PAM
ucauguggcaccaaaauaag

SEQ ID NO: 26626 - RNA, 20 nt, Artificial Sequence
  spacer sequence TTCN PAM
caaacucacuucaucacaaa

SEQ ID NO: 26627 - RNA, 20 nt, Artificial Sequence
  spacer sequence TTCN PAM
augagcucuuugugaugaag

SEQ ID NO: 26628 - RNA, 20 nt, Artificial Sequence
  spacer sequence TTCN PAM
uuggggcaggucucacccag

SEQ ID NO: 26629 - RNA, 20 nt, Artificial Sequence
  spacer sequence TTCN PAM
auuuucauuggggcaggucu

SEQ ID NO: 26630 - RNA, 20 nt, Artificial Sequence
  spacer sequence TTCN PAM
gcuuugaucugcuuccaaca

SEQ ID NO: 26631 - RNA, 20 nt, Artificial Sequence
  spacer sequence TTCN PAM
aacaagucuuaggaauguac

SEQ ID NO: 26632 - RNA, 20 nt, Artificial Sequence
  spacer sequence TTCN PAM
uaagacuuguuggaagcaga

SEQ ID NO: 26633 - RNA, 20 nt, Artificial Sequence
  spacer sequence TTCN PAM
ccuguacauuccuaagacuu

SEQ ID NO: 26634 - RNA, 20 nt, Artificial Sequence
  spacer sequence TTCN PAM
uuaaagacguagaucuggaa

SEQ ID NO: 26635 - RNA, 20 nt, Artificial Sequence
  spacer sequence TTCN PAM
agaucuacgucuuuaaggaa

SEQ ID NO: 26636 - RNA, 20 nt, Artificial Sequence
  spacer sequence TTCN PAM
aagaaccuuuaaaccaaaau

SEQ ID NO: 26637 - RNA, 20 nt, Artificial Sequence
  spacer sequence TTCN PAM
uugaauuccagaucuacguc

SEQ ID NO: 26638 - RNA, 20 nt, Artificial Sequence
  spacer sequence TTCN PAM
ccccaaggacagaaagaaua

SEQ ID NO: 26639 - RNA, 20 nt, Artificial Sequence
  spacer sequence TTCN PAM
guccuuggggagaaaauggg

SEQ ID NO: 26640 - RNA, 20 nt, Artificial Sequence
  spacer sequence TTCN PAM
cugucuaggcaucccaggcu

SEQ ID NO: 26641 - RNA, 20 nt, Artificial Sequence
  spacer sequence TTCN PAM
aaaaguccccguaaagacuc

SEQ ID NO: 26642 - RNA, 20 nt, Artificial Sequence
  spacer sequence TTCN PAM
gagucuuuacggggacuuuu

SEQ ID NO: 26643 - RNA, 20 nt, Artificial Sequence
  spacer sequence TTCN PAM
uuucagagucuuuacgggga

SEQ ID NO: 26644 - RNA, 20 nt, Artificial Sequence
  spacer sequence TTCN PAM
uucauuucagagucuuuacg

SEQ ID NO: 26645 - RNA, 20 nt, Artificial Sequence
  spacer sequence TTCN PAM
ccucucucccccucccucau

SEQ ID NO: 26646 - RNA, 20 nt, Artificial Sequence
  spacer sequence TTCN PAM
uucaacauugacccauuuug

SEQ ID NO: 26647 - RNA, 20 nt, Artificial Sequence
  spacer sequence TTCN PAM
acauugacccauuuuguuca

SEQ ID NO: 26648 - RNA, 20 nt, Artificial Sequence
  spacer sequence TTCN PAM
ggucuaacaacucaaaagca

SEQ ID NO: 26649 - RNA, 20 nt, Artificial Sequence
  spacer sequence TTCN PAM
augacucugcugcuuuugag

SEQ ID NO: 26650 - RNA, 20 nt, Artificial Sequence
  spacer sequence TTCN PAM
uguuggccagacaagcaaac

SEQ ID NO: 26651 - RNA, 20 nt, Artificial Sequence
  spacer sequence TTCN PAM
caugaccucuguaugauaaa

SEQ ID NO: 26652 - RNA, 20 nt, Artificial Sequence
  spacer sequence TTCN PAM
caguuaucauccaagcacug

SEQ ID NO: 26653 - RNA, 20 nt, Artificial Sequence
  spacer sequence TTCN PAM
ggcucaguuuauuauaacgu

SEQ ID NO: 26654 - RNA, 20 nt, Artificial Sequence
  spacer sequence TTCN PAM
cccacacguuauaauaaacu

SEQ ID NO: 26655 - RNA, 20 nt, Artificial Sequence
  spacer sequence TTCN PAM
ccugcacagaaagucaaauc

SEQ ID NO: 26656 - RNA, 20 nt, Artificial Sequence
  spacer sequence TTCN PAM
gugcaggagaacgugcaaca

SEQ ID NO: 26657 - RNA, 20 nt, Artificial Sequence
  spacer sequence TTCN PAM
gacacuuaaaaagacacugu

SEQ ID NO: 26658 - RNA, 20 nt, Artificial Sequence
  spacer sequence TTCN PAM
cacacguacacaagaagauc

SEQ ID NO: 26659 - RNA, 20 nt, Artificial Sequence
  spacer sequence TTCN PAM
uguguacgugugggaaagug

SEQ ID NO: 26660 - RNA, 20 nt, Artificial Sequence
  spacer sequence TTCN PAM
uuugagugucucuggcaugc

SEQ ID NO: 26661 - RNA, 20 nt, Artificial Sequence
  spacer sequence TTCN PAM
caguagucucguuucuuuua

SEQ ID NO: 26662 - RNA, 20 nt, Artificial Sequence
  spacer sequence TTCN PAM
uuuacagcugaguauuucac

SEQ ID NO: 26663 - RNA, 20 nt, Artificial Sequence
  spacer sequence TTCN PAM
cggcagaauuguuccuggau

SEQ ID NO: 26664 - RNA, 20 nt, Artificial Sequence
  spacer sequence TTCN PAM
gccgugaaauacucagcugu

SEQ ID NO: 26665 - RNA, 20 nt, Artificial Sequence
  spacer sequence TTCN PAM
uggauaaagcugcaaguaac

SEQ ID NO: 26666 - RNA, 20 nt, Artificial Sequence
  spacer sequence TTCN PAM
cuagagucauaauauugaau

SEQ ID NO: 26667 - RNA, 20 nt, Artificial Sequence
  spacer sequence TTCN PAM
auauuaugacucuagggaaa

SEQ ID NO: 26668 - RNA, 20 nt, Artificial Sequence
  spacer sequence TTCN PAM
ugggucucauucaauauuau

SEQ ID NO: 26669 - RNA, 20 nt, Artificial Sequence
  spacer sequence TTCN PAM
ccagcaaaugcucucaagag

SEQ ID NO: 26670 - RNA, 20 nt, Artificial Sequence
  spacer sequence TTCN PAM
aagauccuaccucucuccca

SEQ ID NO: 26671 - RNA, 20 nt, Artificial Sequence
  spacer sequence TTCN PAM
uggucccuagggacaauuca

SEQ ID NO: 26672 - RNA, 20 nt, Artificial Sequence
  spacer sequence TTCN PAM
gggugagggaggaaguccug

SEQ ID NO: 26673 - RNA, 20 nt, Artificial Sequence
  spacer sequence TTCN PAM
ucccucacccugaauugucc

SEQ ID NO: 26674 - RNA, 20 nt, Artificial Sequence
  spacer sequence TTCN PAM
ugggaugucauuauguaucc

SEQ ID NO: 26675 - RNA, 20 nt, Artificial Sequence
  spacer sequence TTCN PAM
caauccuauccccaaaagga

SEQ ID NO: 26676 - RNA, 20 nt, Artificial Sequence
  spacer sequence TTCN PAM
uuuuggggauaggauuguga

SEQ ID NO: 26677 - RNA, 20 nt, Artificial Sequence
  spacer sequence TTCN PAM
uuaacuugucuuuccuuuug

SEQ ID NO: 26678 - RNA, 20 nt, Artificial Sequence
  spacer sequence TTCN PAM
ccaucucacauucuuuaacu

SEQ ID NO: 26679 - RNA, 20 nt, Artificial Sequence
  spacer sequence TTCN PAM
ugccagaaugcaguucucuu

SEQ ID NO: 26680 - RNA, 20 nt, Artificial Sequence
  spacer sequence TTCN PAM
ggcaggaauuccccaucuca

SEQ ID NO: 26681 - RNA, 20 nt, Artificial Sequence
  spacer sequence TTCN PAM
cuuuagaauucacuucuucc

SEQ ID NO: 26682 - RNA, 20 nt, Artificial Sequence
  spacer sequence TTCN PAM
aaagagaacugcauucuggc

SEQ ID NO: 26683 - RNA, 20 nt, Artificial Sequence
  spacer sequence TTCN PAM
cuucuuccaauaguccaaca

SEQ ID NO: 26684 - RNA, 20 nt, Artificial Sequence
  spacer sequence TTCN PAM
uccaauaguccaacaagucu

SEQ ID NO: 26685 - RNA, 20 nt, Artificial Sequence
  spacer sequence TTCN PAM
aauaguccaacaagucuagg

SEQ ID NO: 26686 - RNA, 20 nt, Artificial Sequence
  spacer sequence TTCN PAM
agacuggaauacacaaaagc

SEQ ID NO: 26687 - RNA, 20 nt, Artificial Sequence
  spacer sequence TTCN PAM
agucuagaaagcuguuucuu

SEQ ID NO: 26688 - RNA, 20 nt, Artificial Sequence
  spacer sequence TTCN PAM
aaggaaaucaacaauacuuu

SEQ ID NO: 26689 - RNA, 20 nt, Artificial Sequence
  spacer sequence TTCN PAM
uuugaaaaaucacugcuuuu

SEQ ID NO: 26690 - RNA, 20 nt, Artificial Sequence
  spacer sequence TTCN PAM
gcagauuuuuguggggagac

SEQ ID NO: 26691 - RNA, 20 nt, Artificial Sequence
  spacer sequence TTCN PAM
aauacaaaauagaggauuug

SEQ ID NO: 26692 - RNA, 20 nt, Artificial Sequence
  spacer sequence TTCN PAM
aaauccucuauuuuguauug

SEQ ID NO: 26693 - RNA, 20 nt, Artificial Sequence
  spacer sequence TTCN PAM
uccaaauccucuauuuugua

SEQ ID NO: 26694 - RNA, 20 nt, Artificial Sequence
  spacer sequence TTCN PAM
cuuuauucuuccaaauccuc

SEQ ID NO: 26695 - RNA, 20 nt, Artificial Sequence
  spacer sequence TTCN PAM
uaucccuggcuggggagcuu

SEQ ID NO: 26696 - RNA, 20 nt, Artificial Sequence
  spacer sequence TTCN PAM
ucccuucuuguguaugugug

SEQ ID NO: 26697 - RNA, 20 nt, Artificial Sequence
  spacer sequence TTCN PAM
ucccucccucccuuccuccc

SEQ ID NO: 26698 - RNA, 20 nt, Artificial Sequence
  spacer sequence TTCN PAM
ucccucccucccucccucca

SEQ ID NO: 26699 - RNA, 20 nt, Artificial Sequence
  spacer sequence TTCN PAM
uuccucccucccucccuccc

SEQ ID NO: 26700 - RNA, 20 nt, Artificial Sequence
  spacer sequence TTCN PAM
uuccuuccucccucccuccc

SEQ ID NO: 26701 - RNA, 20 nt, Artificial Sequence
  spacer sequence TTCN PAM
uuccuuccuuccucccuccc

SEQ ID NO: 26702 - RNA, 20 nt, Artificial Sequence
  spacer sequence TTCN PAM
uuccuuccuuccuuccuccc

SEQ ID NO: 26703 - RNA, 20 nt, Artificial Sequence
  spacer sequence TTCN PAM
uucuuuccuuccuuccuucc

SEQ ID NO: 26704 - RNA, 20 nt, Artificial Sequence
  spacer sequence TTCN PAM
uuccuucuuuccuuccuucc

SEQ ID NO: 26705 - RNA, 20 nt, Artificial Sequence
  spacer sequence TTCN PAM
uucuuuccuucuuuccuucc

SEQ ID NO: 26706 - RNA, 20 nt, Artificial Sequence
  spacer sequence TTCN PAM
uuccuucuuuccuucuuucc

SEQ ID NO: 26707 - RNA, 20 nt, Artificial Sequence
  spacer sequence TTCN PAM
uuccuuccuucuuuccuucu

SEQ ID NO: 26708 - RNA, 20 nt, Artificial Sequence
  spacer sequence TTCN PAM
cccucccuuuuuuccuuccu

SEQ ID NO: 26709 - RNA, 20 nt, Artificial Sequence
  spacer sequence TTCN PAM
uuucucccucccuuuuuucc

SEQ ID NO: 26710 - RNA, 20 nt, Artificial Sequence
  spacer sequence TTCN PAM
cugcuucuuuucucccuccc

SEQ ID NO: 26711 - RNA, 20 nt, Artificial Sequence
  spacer sequence TTCN PAM
uucccugcuucuuuucuccc

SEQ ID NO: 26712 - RNA, 20 nt, Artificial Sequence
  spacer sequence TTCN PAM
uuccuucccugcuucuuuuc

SEQ ID NO: 26713 - RNA, 20 nt, Artificial Sequence
  spacer sequence TTCN PAM
uuaccuggagcuuagcucag

SEQ ID NO: 26714 - RNA, 20 nt, Artificial Sequence
  spacer sequence TTCN PAM
gagcuaagcuccagguaaag

SEQ ID NO: 26715 - RNA, 20 nt, Artificial Sequence
  spacer sequence TTCN PAM
uugaguugacuucugagcua

SEQ ID NO: 26716 - RNA, 20 nt, Artificial Sequence
  spacer sequence TTCN PAM
gugacacacuuggucugucu

SEQ ID NO: 26717 - RNA, 20 nt, Artificial Sequence
  spacer sequence TTCN PAM
gaaaaggaaaugguaccuga

SEQ ID NO: 26718 - RNA, 20 nt, Artificial Sequence
  spacer sequence TTCN PAM
gaaguuuucugugacacacu

SEQ ID NO: 26719 - RNA, 20 nt, Artificial Sequence
  spacer sequence TTCN PAM
uuuucggaaguuuucuguga

SEQ ID NO: 26720 - RNA, 20 nt, Artificial Sequence
  spacer sequence TTCN PAM
acucagguaccauuuccuuu

SEQ ID NO: 26721 - RNA, 20 nt, Artificial Sequence
  spacer sequence TTCN PAM
aauggcuaacucucacuaau

SEQ ID NO: 26722 - RNA, 20 nt, Artificial Sequence
  spacer sequence TTCN PAM
uguacccauuuccaauggcu

SEQ ID NO: 26723 - RNA, 20 nt, Artificial Sequence
  spacer sequence TTCN PAM
uccuguacccauuuccaaug

SEQ ID NO: 26724 - RNA, 20 nt, Artificial Sequence
  spacer sequence TTCN PAM
caauccuccuggcccucgug

SEQ ID NO: 26725 - RNA, 20 nt, Artificial Sequence
  spacer sequence TTCN PAM
caaagugcuaggauuacagg

SEQ ID NO: 26726 - RNA, 20 nt, Artificial Sequence
  spacer sequence TTCN PAM
gagcucaagugaucugccca

SEQ ID NO: 26727 - RNA, 20 nt, Artificial Sequence
  spacer sequence TTCN PAM
ggcuggucucaaacuucuga

SEQ ID NO: 26728 - RNA, 20 nt, Artificial Sequence
  spacer sequence TTCN PAM
cuccacauggucaugucugu

SEQ ID NO: 26729 - RNA, 20 nt, Artificial Sequence
  spacer sequence TTCN PAM
ucgcagcaugguggcugcau

SEQ ID NO: 26730 - RNA, 20 nt, Artificial Sequence
  spacer sequence TTCN PAM
cuugugaugcagccaccaug

SEQ ID NO: 26731 - RNA, 20 nt, Artificial Sequence
  spacer sequence TTCN PAM
agucucugccucagucuuca

SEQ ID NO: 26732 - RNA, 20 nt, Artificial Sequence
  spacer sequence TTCN PAM
uuggcacguggcugcaccau

SEQ ID NO: 26733 - RNA, 20 nt, Artificial Sequence
  spacer sequence TTCN PAM
ggcuuuccuuggcacguggc

SEQ ID NO: 26734 - RNA, 20 nt, Artificial Sequence
  spacer sequence TTCN PAM
ggugacuucuggcuuuccuu

SEQ ID NO: 26735 - RNA, 20 nt, Artificial Sequence
  spacer sequence TTCN PAM
agcuucuggugacuucuggc

SEQ ID NO: 26736 - RNA, 20 nt, Artificial Sequence
  spacer sequence TTCN PAM
acguuuuaauuauuuauggu

SEQ ID NO: 26737 - RNA, 20 nt, Artificial Sequence
  spacer sequence TTCN PAM
accagccuaaugacuugggg

SEQ ID NO: 26738 - RNA, 20 nt, Artificial Sequence
  spacer sequence TTCN PAM
aucaccccaagucauuaggc

SEQ ID NO: 26739 - RNA, 20 nt, Artificial Sequence
  spacer sequence TTCN PAM
cuuugauucaaucaccccaa

SEQ ID NO: 26740 - RNA, 20 nt, Artificial Sequence
  spacer sequence TTCN PAM
aauagacuucucuagagugc

SEQ ID NO: 26741 - RNA, 20 nt, Artificial Sequence
  spacer sequence TTCN PAM
cuagagugcacagcugaagg

SEQ ID NO: 26742 - RNA, 20 nt, Artificial Sequence
  spacer sequence TTCN PAM
gcugugcacucuagagaagu

SEQ ID NO: 26743 - RNA, 20 nt, Artificial Sequence
  spacer sequence TTCN PAM
cuucagcugugcacucuaga

SEQ ID NO: 26744 - RNA, 20 nt, Artificial Sequence
  spacer sequence TTCN PAM
uaauagacuaacaaaccucu

SEQ ID NO: 26745 - RNA, 20 nt, Artificial Sequence
  spacer sequence TTCN PAM
ucggagaccccaaagguacc

SEQ ID NO: 26746 - RNA, 20 nt, Artificial Sequence
  spacer sequence TTCN PAM
gagaccccaaagguacccgc

SEQ ID NO: 26747 - RNA, 20 nt, Artificial Sequence
  spacer sequence TTCN PAM
uucgagagccaaaaugagua

SEQ ID NO: 26748 - RNA, 20 nt, Artificial Sequence
  spacer sequence TTCN PAM
agagccaaaaugaguacaau

SEQ ID NO: 26749 - RNA, 20 nt, Artificial Sequence
  spacer sequence TTCN PAM
ucugugccagccacaaaacu

SEQ ID NO: 26750 - RNA, 20 nt, Artificial Sequence
  spacer sequence TTCN PAM
uaauuucaucugugccagcc

SEQ ID NO: 26751 - RNA, 20 nt, Artificial Sequence
  spacer sequence TTCN PAM
acuaacaaauuccuaauuuc

SEQ ID NO: 26752 - RNA, 20 nt, Artificial Sequence
  spacer sequence TTCN PAM
auacgcugauuuuccugaca

SEQ ID NO: 26753 - RNA, 20 nt, Artificial Sequence
  spacer sequence TTCN PAM
ugacaacccucucauggucg

SEQ ID NO: 26754 - RNA, 20 nt, Artificial Sequence
  spacer sequence TTCN PAM
cucauccaaauauuuccacu

SEQ ID NO: 26755 - RNA, 20 nt, Artificial Sequence
  spacer sequence TTCN PAM
acuucgcucaaaauggauuc

SEQ ID NO: 26756 - RNA, 20 nt, Artificial Sequence
  spacer sequence TTCN PAM
cucaaaauggauuccaaaca

SEQ ID NO: 26757 - RNA, 20 nt, Artificial Sequence
  spacer sequence TTCN PAM
aaacaguccugggauucuca

SEQ ID NO: 26758 - RNA, 20 nt, Artificial Sequence
  spacer sequence TTCN PAM
cagggaugcuuucaauuccu

SEQ ID NO: 26759 - RNA, 20 nt, Artificial Sequence
  spacer sequence TTCN PAM
auuccuuuuccuagcuagac

SEQ ID NO: 26760 - RNA, 20 nt, Artificial Sequence
  spacer sequence TTCN PAM
uuuuccuagcuagaccaucu

SEQ ID NO: 26761 - RNA, 20 nt, Artificial Sequence
  spacer sequence TTCN PAM
uagcuagaccaucuuuuaga

SEQ ID NO: 26762 - RNA, 20 nt, Artificial Sequence
  spacer sequence TTCN PAM
gcuuaaaacucucacccuuc

SEQ ID NO: 26763 - RNA, 20 nt, Artificial Sequence
  spacer sequence TTCN PAM
uugcaaagcuuaaauggaaa

SEQ ID NO: 26764 - RNA, 20 nt, Artificial Sequence
  spacer sequence TTCN PAM
auuuaagcuuugcaaggaag

SEQ ID NO: 26765 - RNA, 20 nt, Artificial Sequence
  spacer sequence TTCN PAM
ugggaacucgggucccuccu

SEQ ID NO: 26766 - RNA, 20 nt, Artificial Sequence
  spacer sequence TTCN PAM
caggaaaucuaaauuaauaa

SEQ ID NO: 26767 - RNA, 20 nt, Artificial Sequence
  spacer sequence TTCN PAM
uuacuagcccuggccaggag

SEQ ID NO: 26768 - RNA, 20 nt, Artificial Sequence
  spacer sequence TTCN PAM
uuaucuuuaauaggauuucu

SEQ ID NO: 26769 - RNA, 20 nt, Artificial Sequence
  spacer sequence TTCN PAM
cuaaacuuuuugggcuggua

SEQ ID NO: 26770 - RNA, 20 nt, Artificial Sequence
  spacer sequence TTCN PAM
ugaaagguguagagggacag

SEQ ID NO: 26771 - RNA, 20 nt, Artificial Sequence
  spacer sequence TTCN PAM
ggaaaacuaccagcccaaaa

SEQ ID NO: 26772 - RNA, 20 nt, Artificial Sequence
  spacer sequence TTCN PAM
gucccucuacaccuuucagg

SEQ ID NO: 26773 - RNA, 20 nt, Artificial Sequence
  spacer sequence TTCN PAM
uugcaaggcacaaagcugcg

SEQ ID NO: 26774 - RNA, 20 nt, Artificial Sequence
  spacer sequence TTCN PAM
cuaaggacuuauccacagug

SEQ ID NO: 26775 - RNA, 20 nt, Artificial Sequence
  spacer sequence TTCN PAM
ccucauguugaguucucuaa

SEQ ID NO: 26776 - RNA, 20 nt, Artificial Sequence
  spacer sequence TTCN PAM
ucuccucauguugaguucuc

SEQ ID NO: 26777 - RNA, 20 nt, Artificial Sequence
  spacer sequence TTCN PAM
ccaucuucuucuccucaugu

SEQ ID NO: 26778 - RNA, 20 nt, Artificial Sequence
  spacer sequence TTCN PAM
uuucuccaucuucuucuccu

SEQ ID NO: 26779 - RNA, 20 nt, Artificial Sequence
  spacer sequence TTCN PAM
gauuccuuucuccaucuucu

SEQ ID NO: 26780 - RNA, 20 nt, Artificial Sequence
  spacer sequence TTCN PAM
cucccuccucuuugccuuuu

SEQ ID NO: 26781 - RNA, 20 nt, Artificial Sequence
  spacer sequence TTCN PAM
ccacuuucucucccuccucu

SEQ ID NO: 26782 - RNA, 20 nt, Artificial Sequence
  spacer sequence TTCN PAM
ccuucaccacuuucucuccc

SEQ ID NO: 26783 - RNA, 20 nt, Artificial Sequence
  spacer sequence TTCN PAM
uucuccuucaccacuuucuc

SEQ ID NO: 26784 - RNA, 20 nt, Artificial Sequence
  spacer sequence TTCN PAM
uuucccuauacccuaaguuu

SEQ ID NO: 26785 - RNA, 20 nt, Artificial Sequence
  spacer sequence TTCN PAM
ccaccuuucuauaccagucu

SEQ ID NO: 26786 - RNA, 20 nt, Artificial Sequence
  spacer sequence TTCN PAM
auaccagucucuaaaucaag

SEQ ID NO: 26787 - RNA, 20 nt, Artificial Sequence
  spacer sequence TTCN PAM
ugcugggggaagugguuugc

SEQ ID NO: 26788 - RNA, 20 nt, Artificial Sequence
  spacer sequence TTCN PAM
cccagcaagaaauaaaaaau

SEQ ID NO: 26789 - RNA, 20 nt, Artificial Sequence
  spacer sequence TTCN PAM
aaguuauagcaaauaauaaa

SEQ ID NO: 26790 - DNA, 39 bp, Homo sapiens
acccttcctggagcctgtgataaaagcaactgttagctt

SEQ ID NO: 26791 - DNA, 39 bp, Homo sapiens
tgggaaggacctcggacactattttcgttgacaatcgaa

SEQ ID NO: 26792 - protein, 17 aa, Artificial Sequence
  nuclear localization signal
PKTRRRPRRSQRKRPPT

SEQ ID NO: 26793 - protein, 50 aa, Artificial Sequence
  peptide transduction domain
  SITE (4)..(50): individual amino acid residues may be present or absent
RRRRRRRRRRRRRRRRRRRRRRRRRRRRRRRRRRRRRRRRRRRRRRRRRR

SEQ ID NO: 26794 - RNA, 97 nt, Artificial Sequence
  gNA Variant Scaffold
acuggcacuuuuaucugauuacuuugagagccaucaccagcgacuaugucguauggguaaagcgcuuacggacuucgguccguaagaagcaucaaag

SEQ ID NO: 26795 - RNA, 97 nt, Artificial Sequence
  gNA Variant Scaffold
acuggcacuucuaucugauuacucugagagccaucaccagcgacuaugucguauggguaaagcgcuuacggacuucgguccguaagaagcaucagag

SEQ ID NO: 26796 - RNA, 98 nt, Artificial Sequence
  gNA Variant Scaffold
acuggcgcuucuaucugauuacucugagagccaucaccagcgacuaugucguauggguaaagccgcuuacggacuucgguccguaagaggcaucagag

SEQ ID NO: 26797 - RNA, 98 nt, Artificial Sequence
  gNA Variant Scaffold
acuggcacuucuaucugauuacucugagcgccaucaccagcgacuaugucguauggguaaagccgcuuacggacuucgguccguaagaggcaucagag

SEQ ID NO: 26798 - RNA, 98 nt, Artificial Sequence
  gNA Variant Scaffold
acuggcgcuucuaucugauuacucugagcgccaucaccagcgacuaugucguauggguaaagccgcuuacggacuucgguccguaagaggcaucagag

SEQ ID NO: 26799 - RNA, 98 nt, Artificial Sequence
  gNA Variant Scaffold
acuggcgcuucuaucugauuacucugagcgccaucaccagcgacuaugucguauggguaaagcgccuuacggacuucgguccguaaggagcaucagag

SEQ ID NO: 26800 - RNA, 99 nt, Artificial Sequence
  gNA Variant Scaffold
acuggcgcuucuaucugauuacucugagcgccaucaccagcgacuaugucguaguggguaaagccgcuuacggacuucgguccguaagaggcaucagag

SEQ ID NO: 26801 - RNA, 98 nt, Artificial Sequence
  gNA Variant Scaffold
acgggacuuucuaucugauuacucugaagucccucaccagcgacuaugucguauggguaaagccgcuuacggacuucgguccguaagaggcaucagag

SEQ ID NO: 26802 - RNA, 98 nt, Artificial Sequence
  gNA Variant Scaffold
accuguaguucuaucugauuacucugacuacagucaccagcgacuaugucguauggguaaagccgcuuacggacuucgguccguaagaggcaucagag

SEQ ID NO: 26803 - RNA, 113 nt, Artificial Sequence
  gNA Variant Scaffold
acuggcgcuuuuaucugauuacuuugagagccaucaccagcgacuaugucguaguggguaaagcugcacggugggcgcagcuucggcugacgguacaccgugcagcaucaaag

SEQ ID NO: 26804 - RNA, 143 nt, Artificial Sequence
  gNA Variant Scaffold
acuggcgcuuuuaucugauuacuuugagagccaucaccagcgacuaugucguaguggguaaagcugcacggugggcgcagcuucggcugacgguacaccggugggcgcagcuucggcugacgguacaccgugcagcaucaaag

SEQ ID NO: 26805 - RNA, 173 nt, Artificial Sequence
  gNA Variant Scaffold
acuggcgcuuuuaucugauuacuuugagagccaucaccagcgacuaugucguaguggguaaagcugcacggugggcgcagcuucggcugacgguacaccggugggcgcagcuucggcugacgguacaccggugggcgcagcuucggcugacgguacaccgugcagcaucaaag

SEQ ID NO: 26806 - RNA, 203 nt, Artificial Sequence
  gNA Variant Scaffold
acuggcgcuuuuaucugauuacuuugagagccaucaccagcgacuaugucguaguggguaaagcugcacggugggcgcagcuucggcugacgguacaccggugggcgcagcuucggcugacgguacaccggugggcgcagcuucggcugacgguacaccggugggcgcagcuucggcugacgguacaccgugcagcaucaaag

SEQ ID NO: 26807 - RNA, 233 nt, Artificial Sequence
  gNA Variant Scaffold
acuggcgcuuuuaucugauuacuuugagagccaucaccagcgacuaugucguaguggguaaagcugcacggugggcgcagcuucggcugacgguacaccggugggcgcagcuucggcugacgguacaccggugggcgcagcuucggcugacgguacaccggugggcgcagcuucggcugacgguacaccggugggcgcagcuucggcugacgguacaccgugcagcaucaaag

SEQ ID NO: 26808 - RNA, 97 nt, Artificial Sequence
  gNA Variant Scaffold
acuggcgcuuuuaucugauuacuuugagagccaucaccagcgacuaugucguaguggguaaagcugcaccuagcggaggcuaggugcagcaucaaag

SEQ ID NO: 26809 - RNA, 118 nt, Artificial Sequence
  gNA Variant Scaffold
acuggcgcuuuuaucugauuacuuugagagccaucaccagcgacuaugucguaguggguaaagcugcaccucggcuugcugaagcgcgcacggcaagaggcgaggugcagcaucaaag

SEQ ID NO: 26810 - RNA, 192 nt, Artificial Sequence
  gNA Variant Scaffold
acuggcgcuuuuaucugauuacuuugagagccaucaccagcgacuaugucguaguggguaaagcugcaccucucucgacgcaggacucggcuugcugaagcgcgcacggcaagaggcgaggggcggcgacuggugaguacgccaaaaauuuugacuagcggaggcuagaaggagagaggugcagcaucaaag

SEQ ID NO: 26811 - RNA, 156 nt, Artificial Sequence
  gNA Variant Scaffold
acuggcgcuuuuaucugauuacuuugagagccaucaccagcgacuaugucguaguggguaaagcugcacggugcccgucuguugugucgagagacgccaaaaauuuugacuagcggaggcuagaaggagagagaugggugccgugcagcaucaaag

SEQ ID NO: 26812 - RNA, 96 nt, Artificial Sequence
  gNA Variant Scaffold
acuggcgcuuuuaucugauuacuuugagagccaucaccagcgacuaugucguaguggguaaagcugcacauggagaggagaugugcagcaucaaag

SEQ ID NO: 26813 - RNA, 91 nt, Artificial Sequence
  gNA Variant Scaffold
acuggcgcuuuuaucugauuacuuugagagccaucaccagcgacuaugucguaguggguaaagcugcacauggagaugugcagcaucaaag

SEQ ID NO: 26814 - RNA, 106 nt, Artificial Sequence
  gNA Variant Scaffold
acuggcgcuuuuaucugauuacuuugagagccaucaccagcgacuaugucguaguggguaaagcuugggcgcagcgucaaugacgcugacgguacaagcaucaaag

SEQ ID NO: 26815 - RNA, 145 nt, Artificial Sequence
  gNA Variant Scaffold
acuggcgcuuuuaucugauuacuuugagagccaucaccagcgacuaugucguaguggguaaagcugcacuaugggcgcagcgucaaugacgcugacgguacaggccacaugaggaucacccaugugguauagugcagcaucaaag

SEQ ID NO: 26816 - RNA, 155 nt, Artificial Sequence
  gNA Variant Scaffold
acuggcgcuuuuaucugauuacuuugagagccaucaccagcgacuaugucguaguggguaaagcugcacuaugggcgcagcucaugaggaucacccaugagcugacgguacaggccacaugaggaucacccaugugguauagugcagcaucaaag

SEQ ID NO: 26817 - RNA, 151 nt, Artificial Sequence
  gNA Variant Scaffold
acuggcgcuuuuaucugauuacuuugagagccaucaccagcgacuaugucguaguggguaaagcugcacuaugggcgcagcgucaaugacgcugacgguacaggccacauggcagucguaacgacgcgggugguauagugcagcaucaaag

SEQ ID NO: 26818 - RNA, 172 nt, Artificial Sequence
  gNA Variant Scaffold
acuggcgcuuuuaucugauuacuuugagagccaucaccagcgacuaugucguaguggguaaagcugcacuaugggcgcagcaaacauggcaguccuaaggacgcggguuuugcugacgguacaggccacauggcagucguaacgacgcgggugguauagugcagcaucaaag

SEQ ID NO: 26819 - RNA, 159 nt, Artificial Sequence
  gNA Variant Scaffold
acuggcgcuuuuaucugauuacuuugagagccaucaccagcgacuaugucguaguggguaaagcugcacuaugggcgcagacauggcagucguaacgacgcgggucugacgguacaggccacaugaggaucacccaugugguauagugcagcaucaaag

SEQ ID NO: 26820 - RNA, 108 nt, Artificial Sequence
  gNA Variant Scaffold
acuggcgcuuuuaucugauuacuuugagagccaucaccagcgacuaugucguaguggguaaagcugcacuaaggaguuuauauggaaacccuuagugcagcaucaaag

SEQ ID NO: 26821 - RNA, 242 nt, Artificial Sequence
  gNA Variant Scaffold
acuggcgcuuuuaucugauuacuuugagagccaucaccagcgacuaugucguaguggguaaagcucaggaagcacuaugggcgcagcgucaaugacgcugacgguacaggccagacaauuauugucugguauagugcagcagcagaacaauuugcugagggcuauugaggcgcaacagcaucuguugcaacucacagucuggggcaucaagcagcuccaggcaagaauccugagcaucaaag

SEQ ID NO: 26822 - RNA, 98 nt, Artificial Sequence
  gNA Variant Scaffold
acuggcgcuuuuaucugauuacuuugagagccaucaccagcgacuaugucguaguggguaaagcugcacgcccugaagaagggcgugcagcaucaaag

SEQ ID NO: 26823 - RNA, 111 nt, Artificial Sequence
  gNA Variant Scaffold
acuggcgcuuuuaucugauuacuuugagagccaucaccagcgacuaugucguaguggguaaagcugcacggcucguguagcucauuagcuccgagccgugcagcaucaaag

SEQ ID NO: 26824 - RNA, 113 nt, Artificial Sequence
  gNA Variant Scaffold
acuggcgcuuuuaucugauuacuuugagagccaucaccagcgacuaugucguaguggguaaagcugcacccgugugcauccgcagugucggauccacgggugcagcaucaaag

SEQ ID NO: 26825 - RNA, 112 nt, Artificial Sequence
  gNA Variant Scaffold
acuggcgcuuuuaucugauuacuuugagagccaucaccagcgacuaugucguaguggguaaagcugcacggaauccauugcacuccggauuucacuaggugcagcaucaaag

SEQ ID NO: 26826 - RNA, 103 nt, Artificial Sequence
  gNA Variant Scaffold
acuggcgcuuuuaucugauuacuuugagagccaucaccagcgacuaugucguaguggguaaagcugcacaugcaugucuaagacagcaugugcagcaucaaag

SEQ ID NO: 26827 - RNA, 106 nt, Artificial Sequence
  gNA Variant Scaffold
acuggcgcuuuuaucugauuacuuugagagccaucaccagcgacuaugucguaguggguaaagcugcacaaaacauaaggaaaaccuauguugugcagcaucaaag

SEQ ID NO: 26828 - RNA, 153 nt, Artificial Sequence
  gNA Variant Scaffold
acuggcgcuucuaucugauuacucugagcgccaucaccagcgacuaugucguaguggguaaagccgcuuacggacuaugggcgcagcgucaaugacgcugacgguacaggccagacaauuauugucugguauaguccguaagaggcaucagag

SEQ ID NO: 26829 - RNA, 147 nt, Artificial Sequence
  gNA Variant Scaffold
acuggcgcuucuaucugauuacucugagcgccaucaccagcgacuaugucguaguggguaaagccgcuuacgggugggcgcagcgucaaugacgcugacgguacaggccagacaauuauugucugguacccguaagaggcaucagag

SEQ ID NO: 26830 - RNA, 153 nt, Artificial Sequence
  gNA Variant Scaffold
acuggcgcuucuaucugauuacucugagcgccaucaccagcgacuaugucguaguggguaaagccgcuuacgguaugggcgcagcgucaaugacgcugacgguacaggccacaugaggaucacccaugugguauaccguaagaggcaucagag

SEQ ID NO: 26831 - RNA, 143 nt, Artificial Sequence
  gNA Variant Scaffold
acuggcgcuuuuaucugauuacuuugagagccaucaccagcgacuaugucguaguggguaaagcucccuaugggcgcagcgucaaugacgcugacgguacaggccacaugaggaucacccaugugguauagggagcaucaaag

SEQ ID NO: 26832 - RNA, 163 nt, Artificial Sequence
  gNA Variant Scaffold
acuggcgcuucuaucugauuacucugagcgccaucaccagcgacuaugucguaguggguaaagccgcuuacgguaugggcgcagcucaugaggaucacccaugagcugacgguacaggccacaugaggaucacccaugugguauaccguaagaggcaucagag

SEQ ID NO: 26833 - RNA, 153 nt, Artificial Sequence
  gNA Variant Scaffold
acuggcgcuuuuaucugauuacuuugagagccaucaccagcgacuaugucguaguggguaaagcucccuaugggcgcagcucaugaggaucacccaugagcugacgguacaggccacaugaggaucacccaugugguauagggagcaucaaag

SEQ ID NO: 26834 - RNA, 159 nt, Artificial Sequence
  gNA Variant Scaffold
acuggcgcuucuaucugauuacucugagcgccaucaccagcgacuaugucguaguggguaaagccgcuuacgguaugggcgcagcgucaaugacgcugacgguacaggccacauggcagucguaacgacgcgggugguauaccguaagaggcaucagag

SEQ ID NO: 26835 - RNA, 149 nt, Artificial Sequence
  gNA Variant Scaffold
acuggcgcuuuuaucugauuacuuugagagccaucaccagcgacuaugucguaguggguaaagcucccuaugggcgcagcgucaaugacgcugacgguacaggccacauggcagucguaacgacgcgggugguauagggagcaucaaag

SEQ ID NO: 26836 - RNA, 180 nt, Artificial Sequence
  gNA Variant Scaffold
acuggcgcuucuaucugauuacucugagcgccaucaccagcgacuaugucguaguggguaaagccgcuuacgguaugggcgcagcaaacauggcaguccuaaggacgcggguuuugcugacgguacaggccacauggcagucguaacgacgcgggugguauaccguaagaggcaucagag

SEQ ID NO: 26837 - RNA, 170 nt, Artificial Sequence
  gNA Variant Scaffold
acuggcgcuuuuaucugauuacuuugagagccaucaccagcgacuaugucguaguggguaaagcucccuaugggcgcagcaaacauggcaguccuaaggacgcggguuuugcugacgguacaggccacauggcagucguaacgacgcgggugguauagggagcaucaaag

SEQ ID NO: 26838 - RNA, 167 nt, Artificial Sequence
  gNA Variant Scaffold
acuggcgcuucuaucugauuacucugagcgccaucaccagcgacuaugucguaguggguaaagccgcuuacgguaugggcgcagacauggcagucguaacgacgcgggucugacgguacaggccacaugaggaucacccaugugguauaccguaagaggcaucagag

SEQ ID NO: 26839 - RNA, 157 nt, Artificial Sequence
  gNA Variant Scaffold
acuggcgcuuuuaucugauuacuuugagagccaucaccagcgacuaugucguaguggguaaagcucccuaugggcgcagacauggcagucguaacgacgcgggucugacgguacaggccacaugaggaucacccaugugguauagggagcaucaaag

SEQ ID NO: 26840 - protein, 977 aa, Artificial Sequence; identical to SEQ ID NO: 59
  CasX Variant

SEQ ID NO: 26841 - protein, 977 aa, Artificial Sequence; identical to SEQ ID NO: 72
  CasX Variant

SEQ ID NO: 26842 - protein, 977 aa, Artificial Sequence; identical to SEQ ID NO: 73
  CasX Variant

SEQ ID NO: 26843 - protein, 977 aa, Artificial Sequence; identical to SEQ ID NO: 74
  CasX Variant

SEQ ID NO: 26844 - protein, 977 aa, Artificial Sequence; identical to SEQ ID NO: 75
  CasX Variant

SEQ ID NO: 26845 - protein, 977 aa, Artificial Sequence; identical to SEQ ID NO: 77
  CasX Variant

SEQ ID NO: 26846 - protein, 977 aa, Artificial Sequence; identical to SEQ ID NO: 78
  CasX Variant

SEQ ID NO: 26847 - protein, 977 aa, Artificial Sequence; identical to SEQ ID NO: 79
  CasX Variant

SEQ ID NO: 26848 - protein, 977 aa, Artificial Sequence; identical to SEQ ID NO: 80
  CasX Variant

SEQ ID NO: 26849 - protein, 977 aa, Artificial Sequence; identical to SEQ ID NO: 81
  CasX Variant

SEQ ID NO: 26850 - protein, 977 aa, Artificial Sequence; identical to SEQ ID NO: 82
  CasX Variant

SEQ ID NO: 26851 - protein, 977 aa, Artificial Sequence; identical to SEQ ID NO: 83
  CasX Variant

SEQ ID NO: 26852 - protein, 977 aa, Artificial Sequence; identical to SEQ ID NO: 84
  CasX Variant

SEQ ID NO: 26853 - protein, 977 aa, Artificial Sequence; identical to SEQ ID NO: 85
  CasX Variant

SEQ ID NO: 26854 - protein, 977 aa, Artificial Sequence; identical to SEQ ID NO: 86
  CasX Variant

SEQ ID NO: 26855 - protein, 977 aa, Artificial Sequence; identical to SEQ ID NO: 87
  CasX Variant

SEQ ID NO: 26856 - protein, 977 aa, Artificial Sequence; identical to SEQ ID NO: 88
  CasX Variant

SEQ ID NO: 26857 - protein, 977 aa, Artificial Sequence; identical to SEQ ID NO: 89
  CasX Variant

SEQ ID NO: 26858 - protein, 977 aa, Artificial Sequence; identical to SEQ ID NO: 90
  CasX Variant

SEQ ID NO: 26859 - protein, 977 aa, Artificial Sequence; identical to SEQ ID NO: 91
  CasX Variant

SEQ ID NO: 26860 - protein, 977 aa, Artificial Sequence; identical to SEQ ID NO: 92
  CasX Variant

SEQ ID NO: 26861 - protein, 977 aa, Artificial Sequence; identical to SEQ ID NO: 93
  CasX Variant

SEQ ID NO: 26862 - protein, 977 aa, Artificial Sequence; identical to SEQ ID NO: 94
  CasX Variant

SEQ ID NO: 26863 - protein, 977 aa, Artificial Sequence; identical to SEQ ID NO: 95
  CasX Variant

SEQ ID NO: 26864 - protein, 977 aa, Artificial Sequence; identical to SEQ ID NO: 96
  CasX Variant

SEQ ID NO: 26865 - protein, 977 aa, Artificial Sequence; identical to SEQ ID NO: 97
  CasX Variant

SEQ ID NO: 26866 - protein, 977 aa, Artificial Sequence; identical to SEQ ID NO: 98
  CasX Variant

SEQ ID NO: 26867 - protein, 977 aa, Artificial Sequence; identical to SEQ ID NO: 99
  CasX Variant

SEQ ID NO: 26868 - protein, 977 aa, Artificial Sequence; identical to SEQ ID NO: 101
  CasX Variant

SEQ ID NO: 26869 - protein, 977 aa, Artificial Sequence; identical to SEQ ID NO: 102
  CasX Variant

SEQ ID NO: 26870 - protein, 977 aa, Artificial Sequence; identical to SEQ ID NO: 103
  CasX Variant

SEQ ID NO: 26871 - protein, 977 aa, Artificial Sequence; identical to SEQ ID NO: 104
  CasX Variant

SEQ ID NO: 26872 - protein, 977 aa, Artificial Sequence; identical to SEQ ID NO: 59
  CasX Variant

SEQ ID NO: 26873 - protein, 977 aa, Artificial Sequence; identical to SEQ ID NO: 59
  CasX Variant

SEQ ID NO: 26874 - protein, 977 aa, Artificial Sequence; identical to SEQ ID NO: 59
  CasX Variant

SEQ ID NO: 26875 - protein, 977 aa, Artificial Sequence; identical to SEQ ID NO: 59
  CasX Variant

SEQ ID NO: 26876 - protein, 977 aa, Artificial Sequence; identical to SEQ ID NO: 59
  CasX Variant

SEQ ID NO: 26877 - protein, 977 aa, Artificial Sequence; identical to SEQ ID NO: 59
  CasX Variant

SEQ ID NO: 26878 - protein, 977 aa, Artificial Sequence; identical to SEQ ID NO: 59
  CasX Variant

SEQ ID NO: 26879 - protein, 977 aa, Artificial Sequence; identical to SEQ ID NO: 59
  CasX Variant

SEQ ID NO: 26880 - protein, 977 aa, Artificial Sequence; identical to SEQ ID NO: 59
  CasX Variant

SEQ ID NO: 26881 - protein, 977 aa, Artificial Sequence; identical to SEQ ID NO: 59
  CasX Variant

SEQ ID NO: 26882 - protein, 977 aa, Artificial Sequence; identical to SEQ ID NO: 59
  CasX Variant

SEQ ID NO: 26883 - protein, 977 aa, Artificial Sequence; identical to SEQ ID NO: 118
  CasX Variant

SEQ ID NO: 26884 - protein, 976 aa, Artificial Sequence; identical to SEQ ID NO: 119
  CasX Variant

SEQ ID NO: 26885 - protein, 976 aa, Artificial Sequence; identical to SEQ ID NO: 120
  CasX Variant

SEQ ID NO: 26886 - protein, 976 aa, Artificial Sequence; identical to SEQ ID NO: 121
  CasX Variant

SEQ ID NO: 26887 - protein, 976 aa, Artificial Sequence; identical to SEQ ID NO: 122
  CasX Variant

SEQ ID NO: 26888 - protein, 977 aa, Artificial Sequence; identical to SEQ ID NO: 123
  CasX Variant

SEQ ID NO: 26889 - protein, 977 aa, Artificial Sequence; identical to SEQ ID NO: 124
  CasX Variant

SEQ ID NO: 26890 - protein, 977 aa, Artificial Sequence; identical to SEQ ID NO: 125
  CasX Variant

SEQ ID NO: 26891 - protein, 977 aa, Artificial Sequence; identical to SEQ ID NO: 126
  CasX Variant

SEQ ID NO: 26892 - protein, 977 aa, Artificial Sequence; identical to SEQ ID NO: 127
  CasX Variant

SEQ ID NO: 26893 - protein, 978 aa, Artificial Sequence; identical to SEQ ID NO: 128
  CasX Variant

SEQ ID NO: 26894 - protein, 986 aa, Artificial Sequence; identical to SEQ ID NO: 43
  CasX Variant

SEQ ID NO: 26895 - protein, 978 aa, Artificial Sequence; identical to SEQ ID NO: 130
  CasX Variant

SEQ ID NO: 26896 - protein, 972 aa, Artificial Sequence; identical to SEQ ID NO: 131
  CasX Variant

SEQ ID NO: 26897 - protein, 978 aa, Artificial Sequence; identical to SEQ ID NO: 132
  CasX Variant

SEQ ID NO: 26898 - protein, 978 aa, Artificial Sequence; identical to SEQ ID NO: 133
  CasX Variant

SEQ ID NO: 26899 - protein, 977 aa, Artificial Sequence; identical to SEQ ID NO: 134
  CasX Variant

SEQ ID NO: 26900 - protein, 978 aa, Artificial Sequence; identical to SEQ ID NO: 137
  CasX Variant

SEQ ID NO: 26901 - protein, 977 aa, Artificial Sequence; identical to SEQ ID NO: 138
  CasX Variant

SEQ ID NO: 26902 - protein, 977 aa, Artificial Sequence; identical to SEQ ID NO: 139
  CasX Variant

SEQ ID NO: 26903 - protein, 977 aa, Artificial Sequence; identical to SEQ ID NO: 141
  CasX Variant

SEQ ID NO: 26904 - protein, 977 aa, Artificial Sequence; identical to SEQ ID NO: 142
  CasX Variant

SEQ ID NO: 26905 - protein, 977 aa, Artificial Sequence; identical to SEQ ID NO: 143
  CasX Variant

SEQ ID NO: 26906 - protein, 979 aa, Artificial Sequence; identical to SEQ ID NO: 147
  CasX Variant

SEQ ID NO: 26907 - protein, 979 aa, Artificial Sequence; identical to SEQ ID NO: 148
  CasX Variant

SEQ ID NO: 26908 - protein, 979 aa, Artificial Sequence
  CasX Variant
QEIKRINKIRRRLVKDSNTKKAGKTRGPMKTLLVRVMTPDLRERLENLRKKPENIPQPISNTSRANLNKLLTDYTEMKKAILHVYWEEFQKDPVGLMSRVAQPASKKIDQNKLKPEMDEKGNLTTAGFACSQCGQPLFVYKLEQVSEKGKAYTNYFGRCNVAEHEKLILLAQLKPEKDSDEAVTYSLGKFGQRALDFYSIHVTKESTHPVKPLAQIAGNRYASGPVGKALSDACMGTIASFLSKYQDIIIEHQKVVKGNQKRLESLRELAGKENLEYPSVTLPPQPHTKEGVDAYNEVIARVRMWVNLNLWQKLKLSRDDAKPLLRLKGFPSFPLVERQANEVDWWDMVCNVKKLINEKKEDGKVFWQNLAGYKRQEALRPYLSSEEDRKKGKKFARYQLGDLLLHLEKKHGEDWGKVYDEAWERIDKKVEGLSKHIKLEEERRSEDAQSKAALTDWLRAKASFVIEGLKEADKDEFCRCELKLQKWYGDLRGKPFAIEAENSILDISGFSKQYNCAFIWQKDGVKKLNLYLIINYFKGGKLRFKKIKPEAFEANRFYTVINKKSGEIVPMEVNFNFDDPNLIILPLAFGKRQGREFIWNDLLSLETGSLKLANGRVIEKTLYNRRTRQDEPALFVALTFERREVLDSSNIKPMNLIGVDRGENIPAVIALTDPEGCPLSRFKDSLGNPTHILRIGESYKEKQRTIQAKKEVEQRRAGGYSRKYASKAKNLADDMVRNTARDLLYYAVTQDAMLIFENLSRGFGRQGKRTFMAERQYTRMEDWLTAKLAYEGLPSKTYLSKTLAQYTSKTCSNCGFTITSADYDRVLEKLKKTATGWMTTINGKELKVEGQITYYNRYKRQNVVKDLSVELDRLSEESVNNDISSWTKGRSGEALSLLKKRFSHRPVQEKFVCLNCGFETHADEQAALNIARSWLFLRSQEYKKYQTNKTTGNTDKRAFVETWQSFYRKKLKEVWKPAV

SEQ ID NO: 26909 - protein, 979 aa, Artificial Sequence
  CasX Variant
QEIKRINKIRRRLVKDSNTKKAGKTRGPMKTLLVRVMTPDLRERLENLRKKPENIPQPISNTSRANLNKLLTDYTEMKKAILHVYWEEFQKDPVGLMSRVAQPASKKIDQNKLKPEMDEKGNLTTAGFACSQCGQPLFVYKLEQVSEKGKAYTNYFGRCNVAEHEKLILLAQLKPEKDSDEAVTYSLGKFGQRALDFYSIHVTKESTHPVKPLAQIAGNRYASYPVGKALSDACMGTIASFLSKYQDIIIEHQKVVKGNQKRLESLRELAGKENLEYPSVTLPPQPHTKEGVDAYNEVIARVRMWVNLNLWQKLKLSRDDAKPLLRLKGFPSFPLVERQANEVDWWDMVCNVKKLINEKKEDGKVFWQNLAGYKRQEALRPYLSSEEDRKKGKKFARYQLGDLLLHLEKKHGEDWGKVYDEAWERIDKKVEGLSKHIKLEEERRSEDAQSKAALTDWLRAKASFVIEGLKEADKDEFCRCELKLQKWYGDLRGKPFAIEAENSILDISGFSKQYNCAFIWQKDGVKKLNLYLIINYFKGGKLRFKKIKPEAFEANRFYTVINKKSGEIVPMEVNFNFDDPNLIILPLAFGKRQGREFIWNDLLSLETGSLKLANGRVIEKTLYNRRTRQDEPALFVALTFERREVLDSSNIKPMNLIGVDRGENIPAVIALTDPEGCPLSRFKDSLGNPTHILRIGESYKEKQRTIQAKKEVEQRRAGGYSRKYASKAKNLADDMVRNTARDLLYYAVTQDAMLIFENLSRGFGRQGKRTFMAERQYTRMEDWLTAKLAYEGLPSKTYLSKTLAQYTSKTCSNCGFTITSADYDRVLEKLKKTATGWMTTINGKELKVEGQITYYNRYKRQNVVKDLSVELDRLSEESVNNDISSWTKGRSGEALSLLKKRFSHRPVQEKFVCLNCGFETHADEQAALNIARSWLFLRSQEYKKYQTNKTTGNTDKRAFVETWQSFYRKKLKEVWKPAV

SEQ ID NO: 26910 - protein, 978 aa, Artificial Sequence
  CasX Variant
QEIKRINKIRRRLVKDSNTKKAGKTGPMKTLLVRVMTPDLRERLENLRKKPENIPQPISNTSRANLNKLLTDYTEMKKAILHVYWEEFQKDPVGLMSRVAQPASKKIDQNKLKPEMDEKGNLTTAGFACSQCGQPLFVYKLEQVSEKGKAYTNYFGRCNVAEHEKLILLAQLKPEKDSDEAVTYSLGKFGQRALDFYSIHVTKESTHPVKPLAQIAGNRYASHPVGKALSDACMGTIASFLSKYQDIIIEHQKVVKGNQKRLESLRELAGKENLEYPSVTLPPQPHTKEGVDAYNEVIARVRMWVNLNLWQKLKLSRDDAKPLLRLKGFPSFPLVERQANEVDWWDMVCNVKKLINEKKEDGKVFWQNLAGYKRQEALRPYLSSEEDRKKGKKFARYQLGDLLLHLEKKHGEDWGKVYDEAWERIDKKVEGLSKHIKLEEERRSEDAQSKAALTDWLRAKASFVIEGLKEADKDEFCRCELKLQKWYGDLRGKPFAIEAENSILDISGFSKQYNCAFIWQKDGVKKLNLYLIINYFKGGKLRFKKIKPEAFEANRFYTVINKKSGEIVPMEVNFNFDDPNLIILPLAFGKRQGREFIWNDLLSLETGSLKLANGRVIEKTLYNRRTRQDEPALFVALTFERREVLDSSNIKPMNLIGVDRGENIPAVIALTDPEGCPLSRFKDSLGNPTHILRIGESYKEKQRTIQAKKEVEQRRAGGYSRKYASKAKNLADDMVRNTARDLLYYAVTQDAMLIFENLSRGFGRQGKRTFMAERQYTRMEDWLTAKLAYEGLPSKTYLSKTLAQYTSKTCSNCGFTITSADYDRVLEKLKKTATGWMTTINGKELKVEGQITYYNRYKRQNVVKDLSVELDRLSEESVNNDISSWTKGRSGEALSLLKKRFSHRPVQEKFVCLNCGFETHADEQAALNIARSWLFLRSQEYKKYQTNKTTGNTDKRAFVETWQSFYRKKLKEVWKPAV

SEQ ID NO: 26911 - protein, 978 aa, Artificial Sequence
  CasX Variant
QEIKRINKIRRRLVKDSNTKKAGKTGPMKTLLVRVMTPDLRERLENLRKKPENIPQPISNTSRANLNKLLTDYTEMKKAILHVYWEEFQKDPVGLMSRVAQPASKKIDQNKLKPEMDEKGNLTTAGFACSQCGQPLFVYKLEQVSEKGKAYTNYFGRCNVAEHEKLILLAQLKPEKDSDEAVTYSLGKFGQRALDFYSIHVTKESTHPVKPLAQIAGNRYASSPVGKALSDACMGTIASFLSKYQDIIIEHQKVVKGNQKRLESLRELAGKENLEYPSVTLPPQPHTKEGVDAYNEVIARVRMWVNLNLWQKLKLSRDDAKPLLRLKGFPSFPLVERQANEVDWWDMVCNVKKLINEKKEDGKVFWQNLAGYKRQEALRPYLSSEEDRKKGKKFARYQLGDLLLHLEKKHGEDWGKVYDEAWERIDKKVEGLSKHIKLEEERRSEDAQSKAALTDWLRAKASFVIEGLKEADKDEFCRCELKLQKWYGDLRGKPFAIEAENSILDISGFSKQYNCAFIWQKDGVKKLNLYLIINYFKGGKLRFKKIKPEAFEANRFYTVINKKSGEIVPMEVNFNFDDPNLIILPLAFGKRQGREFIWNDLLSLETGSLKLANGRVIEKTLYNRRTRQDEPALFVALTFERREVLDSSNIKPMNLIGVDRGENIPAVIALTDPEGCPLSRFKDSLGNPTHILRIGESYKEKQRTIQAKKEVEQRRAGGYSRKYASKAKNLADDMVRNTARDLLYYAVTQDAMLIFENLSRGFGRQGKRTFMAERQYTRMEDWLTAKLAYEGLPSKTYLSKTLAQYTSKTCSNCGFTITSADYDRVLEKLKKTATGWMTTINGKELKVEGQITYYNRYKRQNVVKDLSVELDRLSEESVNNDISSWTKGRSGEALSLLKKRFSHRPVQEKFVCLNCGFETHADEQAALNIARSWLFLRSQEYKKYQTNKTTGNTDKRAFVETWQSFYRKKLKEVWKPAV

SEQ ID NO: 26912 - protein, 978 aa, Artificial Sequence
  CasX Variant
QEIKRINKIRRRLVKDSNTKKAGKTGPMKTLLVRVMTPDLRERLENLRKKPENIPQPISNTSRANLNKLLTDYTEMKKAILHVYWEEFQKDPVGLMSRVAQPASKKIDQNKLKPEMDEKGNLTTAGFACSQCGQPLFVYKLEQVSEKGKAYTNYFGRCNVAEHEKLILLAQLKPEKDSDEAVTYSLGKFGQRALDFYSIHVTKESTHPVKPLAQIAGNRYASTPVGKALSDACMGTIASFLSKYQDIIIEHQKVVKGNQKRLESLRELAGKENLEYPSVTLPPQPHTKEGVDAYNEVIARVRMWVNLNLWQKLKLSRDDAKPLLRLKGFPSFPLVERQANEVDWWDMVCNVKKLINEKKEDGKVFWQNLAGYKRQEALRPYLSSEEDRKKGKKFARYQLGDLLLHLEKKHGEDWGKVYDEAWERIDKKVEGLSKHIKLEEERRSEDAQSKAALTDWLRAKASFVIEGLKEADKDEFCRCELKLQKWYGDLRGKPFAIEAENSILDISGFSKQYNCAFIWQKDGVKKLNLYLIINYFKGGKLRFKKIKPEAFEANRFYTVINKKSGEIVPMEVNFNFDDPNLIILPLAFGKRQGREFIWNDLLSLETGSLKLANGRVIEKTLYNRRTRQDEPALFVALTFERREVLDSSNIKPMNLIGVDRGENIPAVIALTDPEGCPLSRFKDSLGNPTHILRIGESYKEKQRTIQAKKEVEQRRAGGYSRKYASKAKNLADDMVRNTARDLLYYAVTQDAMLIFENLSRGFGRQGKRTFMAERQYTRMEDWLTAKLAYEGLPSKTYLSKTLAQYTSKTCSNCGFTITSADYDRVLEKLKKTATGWMTTINGKELKVEGQITYYNRYKRQNVVKDLSVELDRLSEESVNNDISSWTKGRSGEALSLLKKRFSHRPVQEKFVCLNCGFETHADEQAALNIARSWLFLRSQEYKKYQTNKTTGNTDKRAFVETWQSFYRKKLKEVWKPAV

SEQ ID NO: 26913 - protein, 978 aa, Artificial Sequence
  CasX Variant
QEIKRINKIRRRLVKDSNTKKAGKTGPMKTLLVRVMTPDLRERLENLRKKPENIPQPISNTSRANLNKLLTDYTEMKKAILHVYWEEFQKDPVGLMSRVAQPASKKIDQNKLKPEMDEKGNLTTAGFACSQCGQPLFVYKLEQVSEKGKAYTNYFGRCNVAEHEKLILLAQLKPEKDSDEAVTYSLGKFGQRALDFYSIHVTKESTHPVKPLAQIAGNRYASAPVGKALSDACMGTIASFLSKYQDIIIEHQKVVKGNQKRLESLRELAGKENLEYPSVTLPPQPHTKEGVDAYNEVIARVRMWVNLNLWQKLKLSRDDAKPLLRLKGFPSFPLVERQANEVDWWDMVCNVKKLINEKKEDGKVFWQNLAGYKRQEALRPYLSSEEDRKKGKKFARYQLGDLLLHLEKKHGEDWGKVYDEAWERIDKKVEGLSKHIKLEEERRSEDAQSKAALTDWLRAKASFVIEGLKEADKDEFCRCELKLQKWYGDLRGKPFAIEAENSILDISGFSKQYNCAFIWQKDGVKKLNLYLIINYFKGGKLRFKKIKPEAFEANRFYTVINKKSGEIVPMEVNFNFDDPNLIILPLAFGKRQGREFIWNDLLSLETGSLKLANGRVIEKTLYNRRTRQDEPALFVALTFERREVLDSSNIKPMNLIGVDRGENIPAVIALTDPEGCPLSRFKDSLGNPTHILRIGESYKEKQRTIQAKKEVEQRRAGGYSRKYASKAKNLADDMVRNTARDLLYYAVTQDAMLIFENLSRGFGRQGKRTFMAERQYTRMEDWLTAKLAYEGLPSKTYLSKTLAQYTSKTCSNCGFTITSADYDRVLEKLKKTATGWMTTINGKELKVEGQITYYNRYKRQNVVKDLSVELDRLSEESVNNDISSWTKGRSGEALSLLKKRFSHRPVQEKFVCLNCGFETHADEQAALNIARSWLFLRSQEYKKYQTNKTTGNTDKRAFVETWQSFYRKKLKEVWKPAV

SEQ ID NO: 26914 - protein, 978 aa, Artificial Sequence
  CasX Variant
QEIKRINKIRRRLVKDSNTKKAGKTGPMKTLLVRVMTPDLRERLENLRKKPENIPQPISNTSRANLNKLLTDYTEMKKAILHVYWEEFQKDPVGLMSRVAQPASKKIDQNKLKPEMDEKGNLTTAGFACSQCGQPLFVYKLEQVSEKGKAYTNYFGRCNVAEHEKLILLAQLKPEKDSDEAVTYSLGKFGQRALDFYSIHVTKESTHPVKPLAQIAGNRYASVPVGKALSDACMGTIASFLSKYQDIIIEHQKVVKGNQKRLESLRELAGKENLEYPSVTLPPQPHTKEGVDAYNEVIARVRMWVNLNLWQKLKLSRDDAKPLLRLKGFPSFPLVERQANEVDWWDMVCNVKKLINEKKEDGKVFWQNLAGYKRQEALRPYLSSEEDRKKGKKFARYQLGDLLLHLEKKHGEDWGKVYDEAWERIDKKVEGLSKHIKLEEERRSEDAQSKAALTDWLRAKASFVIEGLKEADKDEFCRCELKLQKWYGDLRGKPFAIEAENSILDISGFSKQYNCAFIWQKDGVKKLNLYLIINYFKGGKLRFKKIKPEAFEANRFYTVINKKSGEIVPMEVNFNFDDPNLIILPLAFGKRQGREFIWNDLLSLETGSLKLANGRVIEKTLYNRRTRQDEPALFVALTFERREVLDSSNIKPMNLIGVDRGENIPAVIALTDPEGCPLSRFKDSLGNPTHILRIGESYKEKQRTIQAKKEVEQRRAGGYSRKYASKAKNLADDMVRNTARDLLYYAVTQDAMLIFENLSRGFGRQGKRTFMAERQYTRMEDWLTAKLAYEGLPSKTYLSKTLAQYTSKTCSNCGFTITSADYDRVLEKLKKTATGWMTTINGKELKVEGQITYYNRYKRQNVVKDLSVELDRLSEESVNNDISSWTKGRSGEALSLLKKRFSHRPVQEKFVCLNCGFETHADEQAALNIARSWLFLRSQEYKKYQTNKTTGNTDKRAFVETWQSFYRKKLKEVWKPAV

SEQ ID NO: 26915 - protein, 978 aa, Artificial Sequence
  CasX Variant
QEIKRINKIRRRLVKDSNTKKAGKTGPMKTLLVRVMTPDLRERLENLRKKPENIPQPISNTSRANLNKLLTDYTEMKKAILHVYWEEFQKDPVGLMSRVAQPASKKIDQNKLKPEMDEKGNLTTAGFACSQCGQPLFVYKLEQVSEKGKAYTNYFGRCNVAEHEKLILLAQLKPEKDSDEAVTYSLGKFGQRALDFYSIHVTKESTHPVKPLAQIAGNRYASGPVGKALSLACMGTIASFLSKYQDIIIEHQKVVKGNQKRLESLRELAGKENLEYPSVTLPPQPHTKEGVDAYNEVIARVRMWVNLNLWQKLKLSRDDAKPLLRLKGFPSFPLVERQANEVDWWDMVCNVKKLINEKKEDGKVFWQNLAGYKRQEALRPYLSSEEDRKKGKKFARYQLGDLLLHLEKKHGEDWGKVYDEAWERIDKKVEGLSKHIKLEEERRSEDAQSKAALTDWLRAKASFVIEGLKEADKDEFCRCELKLQKWYGDLRGKPFAIEAENSILDISGFSKQYNCAFIWQKDGVKKLNLYLIINYFKGGKLRFKKIKPEAFEANRFYTVINKKSGEIVPMEVNFNFDDPNLIILPLAFGKRQGREFIWNDLLSLETGSLKLANGRVIEKTLYNRRTRQDEPALFVALTFERREVLDSSNIKPMNLIGVDRGENIPAVIALTDPEGCPLSRFKDSLGNPTHILRIGESYKEKQRTIQAKKEVEQRRAGGYSRKYASKAKNLADDMVRNTARDLLYYAVTQDAMLIFENLSRGFGRQGKRTFMAERQYTRMEDWLTAKLAYEGLPSKTYLSKTLAQYTSKTCSNCGFTITSADYDRVLEKLKKTATGWMTTINGKELKVEGQITYYNRYKRQNVVKDLSVELDRLSEESVNNDISSWTKGRSGEALSLLKKRFSHRPVQEKFVCLNCGFETHADEQAALNIARSWLFLRSQEYKKYQTNKTTGNTDKRAFVETWQSFYRKKLKEVWKPAV

SEQ ID NO: 26916 - protein, 978 aa, Artificial Sequence
  CasX Variant
QEIKRINKIRRRLVKDSNTKKAGKTGPMKTLLVRVMTPDLRERLENLRKKPENIPQPISNTSRANLNKLLTDYTEMKKAILHVYWEEFQKDPVGLMSRVAQPASKKIDQNKLKPEMDEKGNLTTAGFACSQCGQPLFVYKLEQVSEKGKAYTNYFGRCNVAEHEKLILLAQLKPEKDSDEAVTYSLGKFGQRALDFYSIHVTKESTHPVKPLAQIAGNRYASGPVGKALSNACMGTIASFLSKYQDIIIEHQKVVKGNQKRLESLRELAGKENLEYPSVTLPPQPHTKEGVDAYNEVIARVRMWVNLNLWQKLKLSRDDAKPLLRLKGFPSFPLVERQANEVDWWDMVCNVKKLINEKKEDGKVFWQNLAGYKRQEALRPYLSSEEDRKKGKKFARYQLGDLLLHLEKKHGEDWGKVYDEAWERIDKKVEGLSKHIKLEEERRSEDAQSKAALTDWLRAKASFVIEGLKEADKDEFCRCELKLQKWYGDLRGKPFAIEAENSILDISGFSKQYNCAFIWQKDGVKKLNLYLIINYFKGGKLRFKKIKPEAFEANRFYTVINKKSGEIVPMEVNFNFDDPNLIILPLAFGKRQGREFIWNDLLSLETGSLKLANGRVIEKTLYNRRTRQDEPALFVALTFERREVLDSSNIKPMNLIGVDRGENIPAVIALTDPEGCPLSRFKDSLGNPTHILRIGESYKEKQRTIQAKKEVEQRRAGGYSRKYASKAKNLADDMVRNTARDLLYYAVTQDAMLIFENLSRGFGRQGKRTFMAERQYTRMEDWLTAKLAYEGLPSKTYLSKTLAQYTSKTCSNCGFTITSADYDRVLEKLKKTATGWMTTINGKELKVEGQITYYNRYKRQNVVKDLSVELDRLSEESVNNDISSWTKGRSGEALSLLKKRFSHRPVQEKFVCLNCGFETHADEQAALNIARSWLFLRSQEYKKYQTNKTTGNTDKRAFVETWQSFYRKKLKEVWKPAV

SEQ ID NO: 26917 - protein, 978 aa, Artificial Sequence
  CasX Variant
QEIKRINKIRRRLVKDSNTKKAGKTGPMKTLLVRVMTPDLRERLENLRKKPENIPQPISNTSRANLNKLLTDYTEMKKAILHVYWEEFQKDPVGLMSRVAQPASKKIDQNKLKPEMDEKGNLTTAGFACSQCGQPLFVYKLEQVSEKGKAYTNYFGRCNVAEHEKLILLAQLKPEKDSDEAVTYSLGKFGQRALDFYSIHVTKESTHPVKPLAQIAGNRYASGPVGKALSQACMGTIASFLSKYQDIIIEHQKVVKGNQKRLESLRELAGKENLEYPSVTLPPQPHTKEGVDAYNEVIARVRMWVNLNLWQKLKLSRDDAKPLLRLKGFPSFPLVERQANEVDWWDMVCNVKKLINEKKEDGKVFWQNLAGYKRQEALRPYLSSEEDRKKGKKFARYQLGDLLLHLEKKHGEDWGKVYDEAWERIDKKVEGLSKHIKLEEERRSEDAQSKAALTDWLRAKASFVIEGLKEADKDEFCRCELKLQKWYGDLRGKPFAIEAENSILDISGFSKQYNCAFIWQKDGVKKLNLYLIINYFKGGKLRFKKIKPEAFEANRFYTVINKKSGEIVPMEVNFNFDDPNLIILPLAFGKRQGREFIWNDLLSLETGSLKLANGRVIEKTLYNRRTRQDEPALFVALTFERREVLDSSNIKPMNLIGVDRGENIPAVIALTDPEGCPLSRFKDSLGNPTHILRIGESYKEKQRTIQAKKEVEQRRAGGYSRKYASKAKNLADDMVRNTARDLLYYAVTQDAMLIFENLSRGFGRQGKRTFMAERQYTRMEDWLTAKLAYEGLPSKTYLSKTLAQYTSKTCSNCGFTITSADYDRVLEKLKKTATGWMTTINGKELKVEGQITYYNRYKRQNVVKDLSVELDRLSEESVNNDISSWTKGRSGEALSLLKKRFSHRPVQEKFVCLNCGFETHADEQAALNIARSWLFLRSQEYKKYQTNKTTGNTDKRAFVETWQSFYRKKLKEVWKPAV

SEQ ID NO: 26918 - protein, 978 aa, Artificial Sequence
  CasX Variant
QEIKRINKIRRRLVKDSNTKKAGKTGPMKTLLVRVMTPDLRERLENLRKKPENIPQPISNTSRANLNKLLTDYTEMKKAILHVYWEEFQKDPVGLMSRVAQPASKKIDQNKLKPEMDEKGNLTTAGFACSQCGQPLFVYKLEQVSEKGKAYTNYFGRCNVAEHEKLILLAQLKPEKDSDEAVTYSLGKFGQRALDFYSIHVTKESTHPVKPLAQIAGNRYASGPVGKALSSACMGTIASFLSKYQDIIIEHQKVVKGNQKRLESLRELAGKENLEYPSVTLPPQPHTKEGVDAYNEVIARVRMWVNLNLWQKLKLSRDDAKPLLRLKGFPSFPLVERQANEVDWWDMVCNVKKLINEKKEDGKVFWQNLAGYKRQEALRPYLSSEEDRKKGKKFARYQLGDLLLHLEKKHGEDWGKVYDEAWERIDKKVEGLSKHIKLEEERRSEDAQSKAALTDWLRAKASFVIEGLKEADKDEFCRCELKLQKWYGDLRGKPFAIEAENSILDISGFSKQYNCAFIWQKDGVKKLNLYLIINYFKGGKLRFKKIKPEAFEANRFYTVINKKSGEIVPMEVNFNFDDPNLIILPLAFGKRQGREFIWNDLLSLETGSLKLANGRVIEKTLYNRRTRQDEPALFVALTFERREVLDSSNIKPMNLIGVDRGENIPAVIALTDPEGCPLSRFKDSLGNPTHILRIGESYKEKQRTIQAKKEVEQRRAGGYSRKYASKAKNLADDMVRNTARDLLYYAVTQDAMLIFENLSRGFGRQGKRTFMAERQYTRMEDWLTAKLAYEGLPSKTYLSKTLAQYTSKTCSNCGFTITSADYDRVLEKLKKTATGWMTTINGKELKVEGQITYYNRYKRQNVVKDLSVELDRLSEESVNNDISSWTKGRSGEALSLLKKRFSHRPVQEKFVCLNCGFETHADEQAALNIARSWLFLRSQEYKKYQTNKTTGNTDKRAFVETWQSFYRKKLKEVWKPAV

SEQ ID NO: 26919 - protein, 978 aa, Artificial Sequence
  CasX Variant
QEIKRINKIRRRLVKDSNTKKAGKTGPMKTLLVRVMTPDLRERLENLRKKPENIPQPISNTSRANLNKLLTDYTEMKKAILHVYWEEFQKDPVGLMSRVAQPASKKIDQNKLKPEMDEKGNLTTAGFACSQCGQPLFVYKLEQVSEKGKAYTNYFGRCNVAEHEKLILLAQLKPEKDSDEAVTYSLGKFGQRALDFYSIHVTKESTHPVKPLAQIAGNRYASGPVGKALSAACMGTIASFLSKYQDIIIEHQKVVKGNQKRLESLRELAGKENLEYPSVTLPPQPHTKEGVDAYNEVIARVRMWVNLNLWQKLKLSRDDAKPLLRLKGFPSFPLVERQANEVDWWDMVCNVKKLINEKKEDGKVFWQNLAGYKRQEALRPYLSSEEDRKKGKKFARYQLGDLLLHLEKKHGEDWGKVYDEAWERIDKKVEGLSKHIKLEEERRSEDAQSKAALTDWLRAKASFVIEGLKEADKDEFCRCELKLQKWYGDLRGKPFAIEAENSILDISGFSKQYNCAFIWQKDGVKKLNLYLIINYFKGGKLRFKKIKPEAFEANRFYTVINKKSGEIVPMEVNFNFDDPNLIILPLAFGKRQGREFIWNDLLSLETGSLKLANGRVIEKTLYNRRTRQDEPALFVALTFERREVLDSSNIKPMNLIGVDRGENIPAVIALTDPEGCPLSRFKDSLGNPTHILRIGESYKEKQRTIQAKKEVEQRRAGGYSRKYASKAKNLADDMVRNTARDLLYYAVTQDAMLIFENLSRGFGRQGKRTFMAERQYTRMEDWLTAKLAYEGLPSKTYLSKTLAQYTSKTCSNCGFTITSADYDRVLEKLKKTATGWMTTINGKELKVEGQITYYNRYKRQNVVKDLSVELDRLSEESVNNDISSWTKGRSGEALSLLKKRFSHRPVQEKFVCLNCGFETHADEQAALNIARSWLFLRSQEYKKYQTNKTTGNTDKRAFVETWQSFYRKKLKEVWKPAV

SEQ ID NO: 26920 - protein, 978 aa, Artificial Sequence
  CasX Variant
QEIKRINKIRRRLVKDSNTKKAGKTGPMKTLLVRVMTPDLRERLENLRKKPENIPQPISNTSRANLNKLLTDYTEMKKAILHVYWEEFQKDPVGLMSRVAQPASKKIDQNKLKPEMDEKGNLTTAGFACSQCGQPLFVYKLEQVSEKGKAYTNYFGRCNVAEHEKLILLAQLKPEKDSDEAVTYSLGKFGQRALDFYSIHVTKESTHPVKPLAQIAGNRYASGPVGKALSGACMGTIASFLSKYQDIIIEHQKVVKGNQKRLESLRELAGKENLEYPSVTLPPQPHTKEGVDAYNEVIARVRMWVNLNLWQKLKLSRDDAKPLLRLKGFPSFPLVERQANEVDWWDMVCNVKKLINEKKEDGKVFWQNLAGYKRQEALRPYLSSEEDRKKGKKFARYQLGDLLLHLEKKHGEDWGKVYDEAWERIDKKVEGLSKHIKLEEERRSEDAQSKAALTDWLRAKASFVIEGLKEADKDEFCRCELKLQKWYGDLRGKPFAIEAENSILDISGFSKQYNCAFIWQKDGVKKLNLYLIINYFKGGKLRFKKIKPEAFEANRFYTVINKKSGEIVPMEVNFNFDDPNLIILPLAFGKRQGREFIWNDLLSLETGSLKLANGRVIEKTLYNRRTRQDEPALFVALTFERREVLDSSNIKPMNLIGVDRGENIPAVIALTDPEGCPLSRFKDSLGNPTHILRIGESYKEKQRTIQAKKEVEQRRAGGYSRKYASKAKNLADDMVRNTARDLLYYAVTQDAMLIFENLSRGFGRQGKRTFMAERQYTRMEDWLTAKLAYEGLPSKTYLSKTLAQYTSKTCSNCGFTITSADYDRVLEKLKKTATGWMTTINGKELKVEGQITYYNRYKRQNVVKDLSVELDRLSEESVNNDISSWTKGRSGEALSLLKKRFSHRPVQEKFVCLNCGFETHADEQAALNIARSWLFLRSQEYKKYQTNKTTGNTDKRAFVETWQSFYRKKLKEVWKPAV

SEQ ID NO: 26921 - protein, 978 aa, Artificial Sequence
  CasX Variant
QEIKRINKIRRRLVKDSNTKKAGKTGPMKTLLVRVMTPDLRERLENLRKKPENIPQPISNTSRANLNKLLTDYTEMKKAILHVYWEEFQKDPVGLMSRVAQPASKKIDQNKLKPEMDEKGNLTTAGFACSQCGQPLFVYKLEQVSEKGKAYTNYFGRCNVAEHEKLILLAQLKPEKDSDEAVTYSLGKFGQRALDFYSIHVTKESTHPVKPLAQIAGNRYASGPVGKALSTACMGTIASFLSKYQDIIIEHQKVVKGNQKRLESLRELAGKENLEYPSVTLPPQPHTKEGVDAYNEVIARVRMWVNLNLWQKLKLSRDDAKPLLRLKGFPSFPLVERQANEVDWWDMVCNVKKLINEKKEDGKVFWQNLAGYKRQEALRPYLSSEEDRKKGKKFARYQLGDLLLHLEKKHGEDWGKVYDEAWERIDKKVEGLSKHIKLEEERRSEDAQSKAALTDWLRAKASFVIEGLKEADKDEFCRCELKLQKWYGDLRGKPFAIEAENSILDISGFSKQYNCAFIWQKDGVKKLNLYLIINYFKGGKLRFKKIKPEAFEANRFYTVINKKSGEIVPMEVNFNFDDPNLIILPLAFGKRQGREFIWNDLLSLETGSLKLANGRVIEKTLYNRRTRQDEPALFVALTFERREVLDSSNIKPMNLIGVDRGENIPAVIALTDPEGCPLSRFKDSLGNPTHILRIGESYKEKQRTIQAKKEVEQRRAGGYSRKYASKAKNLADDMVRNTARDLLYYAVTQDAMLIFENLSRGFGRQGKRTFMAERQYTRMEDWLTAKLAYEGLPSKTYLSKTLAQYTSKTCSNCGFTITSADYDRVLEKLKKTATGWMTTINGKELKVEGQITYYNRYKRQNVVKDLSVELDRLSEESVNNDISSWTKGRSGEALSLLKKRFSHRPVQEKFVCLNCGFETHADEQAALNIARSWLFLRSQEYKKYQTNKTTGNTDKRAFVETWQSFYRKKLKEVWKPAV

SEQ ID NO: 26922 - protein, 978 aa, Artificial Sequence
  CasX Variant
QEIKRINKIRRRLVKDSNTKKAGKRGPMKTLLVRVMTPDLRERLENLRKKPENIPQPISNTSRANLNKLLTDYTEMKKAILHVYWEEFQKDPVGLMSRVAQPASKKIDQNKLKPEMDEKGNLTTAGFACSQCGQPLFVYKLEQVSEKGKAYTNYFGRCNVAEHEKLILLAQLKPEKDSDEAVTYSLGKFGQRALDFYSIHVTKESTHPVKPLAQIAGNRYASGPVGKALSDACMGTIASFLSKYQDIIIEHQKVVKGNQKRLESLRELAGKENLEYPSVTLPPQPHTKEGVDAYNEVIARVRMWVNLNLWQKLKLSRDDAKPLLRLKGFPSFPLVERQANEVDWWDMVCNVKKLINEKKEDGKVFWQNLAGYKRQEALRPYLSSEEDRKKGKKFARYQLGDLLLHLEKKHGEDWGKVYDEAWERIDKKVEGLSKHIKLEEERRSEDAQSKAALTDWLRAKASFVIEGLKEADKDEFCRCELKLQKWYGDLRGKPFAIEAENSILDISGFSKQYNCAFIWQKDGVKKLNLYLIINYFKGGKLRFKKIKPEAFEANRFYTVINKKSGEIVPMEVNFNFDDPNLIILPLAFGKRQGREFIWNDLLSLETGSLKLANGRVIEKTLYNRRTRQDEPALFVALTFERREVLDSSNIKPMNLIGVDRGENIPAVIALTDPEGCPLSRFKDSLGNPTHILRIGESYKEKQRTIQAKKEVEQRRAGGYSRKYASKAKNLADDMVRNTARDLLYYAVTQDAMLIFENLSRGFGRQGKRTFMAERQYTRMEDWLTAKLAYEGLPSKTYLSKTLAQYTSKTCSNCGFTITSADYDRVLEKLKKTATGWMTTINGKELKVEGQITYYNRYKRQNVVKDLSVELDRLSEESVNNDISSWTKGRSGEALSLLKKRFSHRPVQEKFVCLNCGFETHADEQAALNIARSWLFLRSQEYKKYQTNKTTGNTDKRAFVETWQSFYRKKLKEVWKPAV

SEQ ID NO: 26923 - protein, 978 aa, Artificial Sequence
  CasX Variant
QEIKRINKIRRRLVKDSNTKKAGKTGPMKTLLVRVMTPDLRERLENLRKKPENIPQPISNTSRANLNKLLTDYTEMKKAILHVYWEEFQKDPVGLMSRVAQPASKKIDQNKLKPEMDEKGNLTTAGFACSQCGQPLFVYKLEQVSEKGKAYTNYFGRCNVAEHEKLILLAQLKPEKDSDEAVTYSLGKFGQRALDFYSIHVTKESTHPVKPLAQIAGNRYASGPVGKALSDACMGTIASFLSKYQDIIIEHQKVVKGNQKRLESLRELAGKENLEYPSVTLPPQPHTKEGVDAYNEVIARVRMWVNLNLWQKLKLSRDDAKPLLRLKGFPSFPLVERQANEVDWWDMVCNVKKLINEKKEDGKVFWQNLAGYKRQEALRPYLSSEEDRKKGKKFARYQLHDLLLHLEKKHGEDWGKVYDEAWERIDKKVEGLSKHIKLEEERRSEDAQSKAALTDWLRAKASFVIEGLKEADKDEFCRCELKLQKWYGDLRGKPFAIEAENSILDISGFSKQYNCAFIWQKDGVKKLNLYLIINYFKGGKLRFKKIKPEAFEANRFYTVINKKSGEIVPMEVNFNFDDPNLIILPLAFGKRQGREFIWNDLLSLETGSLKLANGRVIEKTLYNRRTRQDEPALFVALTFERREVLDSSNIKPMNLIGVDRGENIPAVIALTDPEGCPLSRFKDSLGNPTHILRIGESYKEKQRTIQAKKEVEQRRAGGYSRKYASKAKNLADDMVRNTARDLLYYAVTQDAMLIFENLSRGFGRQGKRTFMAERQYTRMEDWLTAKLAYEGLPSKTYLSKTLAQYTSKTCSNCGFTITSADYDRVLEKLKKTATGWMTTINGKELKVEGQITYYNRYKRQNVVKDLSVELDRLSEESVNNDISSWTKGRSGEALSLLKKRFSHRPVQEKFVCLNCGFETHADEQAALNIARSWLFLRSQEYKKYQTNKTTGNTDKRAFVETWQSFYRKKLKEVWKPAV

SEQ ID NO: 26924 - protein, 979 aa, Artificial Sequence
  CasX Variant
QEIKRINKIRRRLVKDSNTKKAGKTGPMKTLLVRVMTPDLRERLENLRKKPENIPQPISNTSRANLNKLLTDYTEMKKAILHVYWEEFQKDPVGLMSRVAQPASKKIDQNKLKPEMDEKEGNLTTAGFACSQCGQPLFVYKLEQVSEKGKAYTNYFGRCNVAEHEKLILLAQLKPEKDSDEAVTYSLGKFGQRALDFYSIHVTKESTHPVKPLAQIAGNRYASGPVGKALSDACMGTIASFLSKYQDIIIEHQKVVKGNQKRLESLRELAGKENLEYPSVTLPPQPHTKEGVDAYNEVIARVRMWVNLNLWQKLKLSRDDAKPLLRLKGFPSFPLVERQANEVDWWDMVCNVKKLINEKKEDGKVFWQNLAGYKRQEALRPYLSSEEDRKKGKKFARYQLGDLLLHLEKKHGEDWGKVYDEAWERIDKKVEGLSKHIKLEEERRSEDAQSKAALTDWLRAKASFVIEGLKEADKDEFCRCELKLQKWYGDLRGKPFAIEAENSILDISGFSKQYNCAFIWQKDGVKKLNLYLIINYFKGGKLRFKKIKPEAFEANRFYTVINKKSGEIVPMEVNFNFDDPNLIILPLAFGKRQGREFIWNDLLSLETGSLKLANGRVIEKTLYNRRTRQDEPALFVALTFERREVLDSSNIKPMNLIGVDRGENIPAVIALTDPEGCPLSRFKDSLGNPTHILRIGESYKEKQRTIQAKKEVEQRRAGGYSRKYASKAKNLADDMVRNTARDLLYYAVTQDAMLIFENLSRGFGRQGKRTFMAERQYTRMEDWLTAKLAYEGLPSKTYLSKTLAQYTSKTCSNCGFTITSADYDRVLEKLKKTATGWMTTINGKELKVEGQITYYNRYKRQNVVKDLSVELDRLSEESVNNDISSWTKGRSGEALSLLKKRFSHRPVQEKFVCLNCGFETHADEQAALNIARSWLFLRSQEYKKYQTNKTTGNTDKRAFVETWQSFYRKKLKEVWKPAV

SEQ ID NO: 26925 - protein, 978 aa, Artificial Sequence
  CasX Variant
QEIKRINKIRRRLVKDSNTKKAGKTGPMKTLLVRVMTPDLRERLENLRKKPENIPQPISNTSRANLNKLLTDYTEMKKAILHVYWEEFQKDPVGLMSRVAQPASKKIDQNKLKPEMDEKGNLTTAGFACSQCGQPLFVYKLEQVSEKGKAYTNYFGRCNVAEHEKLILLAQLKPEKDSDEAVTYSLGKFGQRALDFYSIHVTKESTHPVKPLAQIAGNRYASGPVGKALSDACMGTIASFLSKYQDIIIEHQKVVKGNQKRLESLRELAGKENLEYPSVTLPPQPHTKEGVDAYNEVIARVRMWVNINLWQKLKLSRDDAKPLLRLKGFPSFPLVERQANEVDWWDMVCNVKKLINEKKEDGKVFWQNLAGYKRQEALRPYLSSEEDRKKGKKFARYQLGDLLLHLEKKHGEDWGKVYDEAWERIDKKVEGLSKHIKLEEERRSEDAQSKAALTDWLRAKASFVIEGLKEADKDEFCRCELKLQKWYGDLRGKPFAIEAENSILDISGFSKQYNCAFIWQKDGVKKLNLYLIINYFKGGKLRFKKIKPEAFEANRFYTVINKKSGEIVPMEVNFNFDDPNLIILPLAFGKRQGREFIWNDLLSLETGSLKLANGRVIEKTLYNRRTRQDEPALFVALTFERREVLDSSNIKPMNLIGVDRGENIPAVIALTDPEGCPLSRFKDSLGNPTHILRIGESYKEKQRTIQAKKEVEQRRAGGYSRKYASKAKNLADDMVRNTARDLLYYAVTQDAMLIFENLSRGFGRQGKRTFMAERQYTRMEDWLTAKLAYEGLPSKTYLSKTLAQYTSKTCSNCGFTITSADYDRVLEKLKKTATGWMTTINGKELKVEGQITYYNRYKRQNVVKDLSVELDRLSEESVNNDISSWTKGRSGEALSLLKKRFSHRPVQEKFVCLNCGFETHADEQAALNIARSWLFLRSQEYKKYQTNKTTGNTDKRAFVETWQSFYRKKLKEVWKPAV

SEQ ID NO: 26926 - protein, 979 aa, Artificial Sequence
  CasX Variant
QEIKRINKIRRRLVKDSNTKKAGKTGPMKTLLVRVMTPDLRERLENLRKKPENIPQPISNTSRANLNKLLTDYTEMKKAILHVYWEEFQKDPVGLMSRVAQPASKKIDQNKLKPEMDEKGNLTTAGFACSQCGQPLFVYKLEQVSEKGKAYTNYFGRCNVAEHEKLILLAQLKPEKDSDEAVTYSLGKFGQRALDFYSIHVTKESTHPVKPLAQIAGNRYASGPVGKALSDACMGTIASFLSKYQDIIIEHQKVVKGNQKRLESLRELAGKENLEYPSVTLPPQPHTKEGVDAYNEVIARVRMWVNLNLWQKLKLSRDDAKPLLRLKGFPSFPLVERQANEVDWWDMVCNVKKLINEKKEDGKVFWQNLAGYKRQEALRPYLFSSEEDRKKGKKFARYQLGDLLLHLEKKHGEDWGKVYDEAWERIDKKVEGLSKHIKLEEERRSEDAQSKAALTDWLRAKASFVIEGLKEADKDEFCRCELKLQKWYGDLRGKPFAIEAENSILDISGFSKQYNCAFIWQKDGVKKLNLYLIINYFKGGKLRFKKIKPEAFEANRFYTVINKKSGEIVPMEVNFNFDDPNLIILPLAFGKRQGREFIWNDLLSLETGSLKLANGRVIEKTLYNRRTRQDEPALFVALTFERREVLDSSNIKPMNLIGVDRGENIPAVIALTDPEGCPLSRFKDSLGNPTHILRIGESYKEKQRTIQAKKEVEQRRAGGYSRKYASKAKNLADDMVRNTARDLLYYAVTQDAMLIFENLSRGFGRQGKRTFMAERQYTRMEDWLTAKLAYEGLPSKTYLSKTLAQYTSKTCSNCGFTITSADYDRVLEKLKKTATGWMTTINGKELKVEGQITYYNRYKRQNVVKDLSVELDRLSEESVNNDISSWTKGRSGEALSLLKKRFSHRPVQEKFVCLNCGFETHADEQAALNIARSWLFLRSQEYKKYQTNKTTGNTDKRAFVETWQSFYRKKLKEVWKPAV

SEQ ID NO: 26927 - protein, 979 aa, Artificial Sequence
  CasX Variant
QEIKRINKIRRRLVKDSNTKKAGKTGPMKTLLVRVMTPDLRERLENLRKKPENIPQPISNTSRANLNKLLTDYTEMKKAILHVYWEEFQKDPVGLMSRVAQPASKKIDQNKLKPEMDEKGNLTTAGFACSQCGQPLFVYKWLEQVSEKGKAYTNYFGRCNVAEHEKLILLAQLKPEKDSDEAVTYSLGKFGQRALDFYSIHVTKESTHPVKPLAQIAGNRYASGPVGKALSDACMGTIASFLSKYQDIIIEHQKVVKGNQKRLESLRELAGKENLEYPSVTLPPQPHTKEGVDAYNEVIARVRMWVNLNLWQKLKLSRDDAKPLLRLKGFPSFPLVERQANEVDWWDMVCNVKKLINEKKEDGKVFWQNLAGYKRQEALRPYLSSEEDRKKGKKFARYQLGDLLLHLEKKHGEDWGKVYDEAWERIDKKVEGLSKHIKLEEERRSEDAQSKAALTDWLRAKASFVIEGLKEADKDEFCRCELKLQKWYGDLRGKPFAIEAENSILDISGFSKQYNCAFIWQKDGVKKLNLYLIINYFKGGKLRFKKIKPEAFEANRFYTVINKKSGEIVPMEVNFNFDDPNLIILPLAFGKRQGREFIWNDLLSLETGSLKLANGRVIEKTLYNRRTRQDEPALFVALTFERREVLDSSNIKPMNLIGVDRGENIPAVIALTDPEGCPLSRFKDSLGNPTHILRIGESYKEKQRTIQAKKEVEQRRAGGYSRKYASKAKNLADDMVRNTARDLLYYAVTQDAMLIFENLSRGFGRQGKRTFMAERQYTRMEDWLTAKLAYEGLPSKTYLSKTLAQYTSKTCSNCGFTITSADYDRVLEKLKKTATGWMTTINGKELKVEGQITYYNRYKRQNVVKDLSVELDRLSEESVNNDISSWTKGRSGEALSLLKKRFSHRPVQEKFVCLNCGFETHADEQAALNIARSWLFLRSQEYKKYQTNKTTGNTDKRAFVETWQSFYRKKLKEVWKPAV

SEQ ID NO: 26928 - protein, 978 aa, Artificial Sequence
  CasX Variant
QEIKRINKIRRRLVKDSNTKKAGKTGPMKTLLVRVMTPDLRERLENLRKKPENIPQPISNTSRANLNKLLTDYTEMKKAILHVYWEEFQKDPVGLMSRVAQPASKKIDQNKLKPEMDEKGNLTTAGFACSQCGQPLFVYKLEQVSEKGKAYTNYFGRCNVAEHEKLILLAQLKPEKDSDEAVTYSLGKFGQRALDFYSIHVTKESTHPVKPLAQIAGNRYASGPVGKALSDACMGTIASFLSKYQDIIIEHQKVVKGNQKRLESLRELAGKENLEYPSVTLPPQPHTKEGVDAYNEVIARVRMWVNDNLWQKLKLSRDDAKPLLRLKGFPSFPLVERQANEVDWWDMVCNVKKLINEKKEDGKVFWQNLAGYKRQEALRPYLSSEEDRKKGKKFARYQLGDLLLHLEKKHGEDWGKVYDEAWERIDKKVEGLSKHIKLEEERRSEDAQSKAALTDWLRAKASFVIEGLKEADKDEFCRCELKLQKWYGDLRGKPFAIEAENSILDISGFSKQYNCAFIWQKDGVKKLNLYLIINYFKGGKLRFKKIKPEAFEANRFYTVINKKSGEIVPMEVNFNFDDPNLIILPLAFGKRQGREFIWNDLLSLETGSLKLANGRVIEKTLYNRRTRQDEPALFVALTFERREVLDSSNIKPMNLIGVDRGENIPAVIALTDPEGCPLSRFKDSLGNPTHILRIGESYKEKQRTIQAKKEVEQRRAGGYSRKYASKAKNLADDMVRNTARDLLYYAVTQDAMLIFENLSRGFGRQGKRTFMAERQYTRMEDWLTAKLAYEGLPSKTYLSKTLAQYTSKTCSNCGFTITSADYDRVLEKLKKTATGWMTTINGKELKVEGQITYYNRYKRQNVVKDLSVELDRLSEESVNNDISSWTKGRSGEALSLLKKRFSHRPVQEKFVCLNCGFETHADEQAALNIARSWLFLRSQEYKKYQTNKTTGNTDKRAFVETWQSFYRKKLKEVWKPAV

SEQ ID NO: 26929 - protein, 978 aa, Artificial Sequence
  CasX Variant
QEIKRINKIRRRLVKDSNTKKAGKTGPMKTLLVRVMTPDLRERLENLRKKPENIPQPISNTSRANLNKLLTDYTEMKKAILHVYWEEFQKDPVGLMSRVAQPASKKIDQNKLKPEMDEKGNLTTAGFACSQCGQPLFVYKLEQVSEKGKAYTNYFGRCNVAEHEKLILLAQLKPEKDSDEAVTYSLGKFGQRALDFYSIHVTKESTHPVKPLAQIAGNRYASGPVGKALSDACMGTIASFLSKYQDIIIEHQKVVKGNQKRLESLRELAGKENLEYPSVTLPPQPHTKEGVDAYNEVIARVRMWVNLNLWQKLKLSRDDAKPLLRLKGFPSFPLVERQANEVDWWDMVCNVKKLINEKKEDGKVFWQNLAGYKRQEALRPYLSSEEDRKKGKKFARYQLGDLLLHLEKKHGEDWGKVYDEAWERIDKKVEGLSKHIKLEEERRSEDAQSKAALTDWLRAKASFVIEGLKEADKDEFCRCELKLQKWYGDLRGKPFAIEAENSILDISGFSTQYNCAFIWQKDGVKKLNLYLIINYFKGGKLRFKKIKPEAFEANRFYTVINKKSGEIVPMEVNFNFDDPNLIILPLAFGKRQGREFIWNDLLSLETGSLKLANGRVIEKTLYNRRTRQDEPALFVALTFERREVLDSSNIKPMNLIGVDRGENIPAVIALTDPEGCPLSRFKDSLGNPTHILRIGESYKEKQRTIQAKKEVEQRRAGGYSRKYASKAKNLADDMVRNTARDLLYYAVTQDAMLIFENLSRGFGRQGKRTFMAERQYTRMEDWLTAKLAYEGLPSKTYLSKTLAQYTSKTCSNCGFTITSADYDRVLEKLKKTATGWMTTINGKELKVEGQITYYNRYKRQNVVKDLSVELDRLSEESVNNDISSWTKGRSGEALSLLKKRFSHRPVQEKFVCLNCGFETHADEQAALNIARSWLFLRSQEYKKYQTNKTTGNTDKRAFVETWQSFYRKKLKEVWKPAV

SEQ ID NO: 26930 - protein, 978 aa, Artificial Sequence
  CasX Variant
QEIKRINKIRRRLVKDSNTKKAGKTGPMKTLLVRVMTPDLRERLENLRKKPENIPQPISNTSRANLNKLLTDYTEMKKAILHVYWEEFQKDPVGLMSRVAQPASKKIDQNKLKPEMDEKGNLTTAGFACSQCGQPLFVYKLEQVSEKGKAYTNYFGRCNVAEHEKLILLDQLKPEKDSDEAVTYSLGKFGQRALDFYSIHVTKESTHPVKPLAQIAGNRYASGPVGKALSDACMGTIASFLSKYQDIIIEHQKVVKGNQKRLESLRELAGKENLEYPSVTLPPQPHTKEGVDAYNEVIARVRMWVNLNLWQKLKLSRDDAKPLLRLKGFPSFPLVERQANEVDWWDMVCNVKKLINEKKEDGKVFWQNLAGYKRQEALRPYLSSEEDRKKGKKFARYQLGDLLLHLEKKHGEDWGKVYDEAWERIDKKVEGLSKHIKLEEERRSEDAQSKAALTDWLRAKASFVIEGLKEADKDEFCRCELKLQKWYGDLRGKPFAIEAENSILDISGFSKQYNCAFIWQKDGVKKLNLYLIINYFKGGKLRFKKIKPEAFEANRFYTVINKKSGEIVPMEVNFNFDDPNLIILPLAFGKRQGREFIWNDLLSLETGSLKLANGRVIEKTLYNRRTRQDEPALFVALTFERREVLDSSNIKPMNLIGVDRGENIPAVIALTDPEGCPLSRFKDSLGNPTHILRIGESYKEKQRTIQAKKEVEQRRAGGYSRKYASKAKNLADDMVRNTARDLLYYAVTQDAMLIFENLSRGFGRQGKRTFMAERQYTRMEDWLTAKLAYEGLPSKTYLSKTLAQYTSKTCSNCGFTITSADYDRVLEKLKKTATGWMTTINGKELKVEGQITYYNRYKRQNVVKDLSVELDRLSEESVNNDISSWTKGRSGEALSLLKKRFSHRPVQEKFVCLNCGFETHADEQAALNIARSWLFLRSQEYKKYQTNKTTGNTDKRAFVETWQSFYRKKLKEVWKPAV

SEQ ID NO: 26931 - protein, 978 aa, Artificial Sequence
  CasX Variant
QEIKRINKIRRRLVKDSNTKKAGKTGPMKTLLVRVMTPDLRERLENLRKKPENIPQPISNTSRANLNKLLTDYTEMKKAILHVYWEEFQKDPVGLMSRVAQPASKKIDQNKLKPEMDEKGNLTTAGFACSQCGQPLFVYKLEQVSEKGKAYTNYFGRCNVAEHEKLIPLAQLKPEKDSDEAVTYSLGKFGQRALDFYSIHVTKESTHPVKPLAQIAGNRYASGPVGKALSDACMGTIASFLSKYQDIIIEHQKVVKGNQKRLESLRELAGKENLEYPSVTLPPQPHTKEGVDAYNEVIARVRMWVNLNLWQKLKLSRDDAKPLLRLKGFPSFPLVERQANEVDWWDMVCNVKKLINEKKEDGKVFWQNLAGYKRQEALRPYLSSEEDRKKGKKFARYQLGDLLLHLEKKHGEDWGKVYDEAWERIDKKVEGLSKHIKLEEERRSEDAQSKAALTDWLRAKASFVIEGLKEADKDEFCRCELKLQKWYGDLRGKPFAIEAENSILDISGFSKQYNCAFIWQKDGVKKLNLYLIINYFKGGKLRFKKIKPEAFEANRFYTVINKKSGEIVPMEVNFNFDDPNLIILPLAFGKRQGREFIWNDLLSLETGSLKLANGRVIEKTLYNRRTRQDEPALFVALTFERREVLDSSNIKPMNLIGVDRGENIPAVIALTDPEGCPLSRFKDSLGNPTHILRIGESYKEKQRTIQAKKEVEQRRAGGYSRKYASKAKNLADDMVRNTARDLLYYAVTQDAMLIFENLSRGFGRQGKRTFMAERQYTRMEDWLTAKLAYEGLPSKTYLSKTLAQYTSKTCSNCGFTITSADYDRVLEKLKKTATGWMTTINGKELKVEGQITYYNRYKRQNVVKDLSVELDRLSEESVNNDISSWTKGRSGEALSLLKKRFSHRPVQEKFVCLNCGFETHADEQAALNIARSWLFLRSQEYKKYQTNKTTGNTDKRAFVETWQSFYRKKLKEVWKPAV

SEQ ID NO: 26932 - protein, 978 aa, Artificial Sequence
  CasX Variant
QEIKRINKIRRRLVKDSNTKKAGKTGPMKTLLVRVMTPDLRERLENLRKKPENIPQPISNTSRANLNKLLTDYTEMKKAILHVYWEEFQKDPVGLMSRVAQPASKKIDQNKLKPEMDEKGNLTTAGFACSQCGQPLFVYKLEQVSEKGKAYTNYFGRCNVAEHEKLILLAQLKPEKDSDEAVTYSLGKFGQRALDFYSIHVTKESTHPVKPLAQIAGNRYASGPVGKALSDACMGTIASFLSKYQDIIIEHQKVVKGNQKRLESLRELAGKENLEYPSVTLPPQPHTKEGVDAYNEVIARVRMWVNLNLWQKLKLSRDDAKPLLRLKGFPSFPLVERQANEVDWWDMVCNVKKLINEKKEDGKVFWQNLAGYKRQEALRPYLSSEEDRKKGKKFARYQLGDLLLHLEKKHGEDWGKVYDEAWERIDKKVEGLSKHIKLEEERRSEDAQSKAALTDWLRAKASFVIEGLKEADKDEFCRCELKLQKWYGDLRGKPFAIEAENSILDISGFSKQYNCAFIWQKDGVKKLNLYLIINYFKGGKLRFKKIKPEAFEANRFYTVINKKSGEIVPMEVNFNFDDPNLIILPLAFGKRQGREFIWNDLLSLETGSLKLANGRVIEKTLYNRRTRQDEPALFVALTFERREVLDSSNIKPMNLIGVDRGENIPAVIALTDPEGCPLSRFKDSLGNPTHILRIGESYKEKQRTIQAKKEVEQRRAGGYSRKYASKAKNLADDMVRNTARDLLYYAVTQDAMLIFENLSRGFGRQGKRTFMAERQYTRMEDWLTAKKAYEGLPSKTYLSKTLAQYTSKTCSNCGFTITSADYDRVLEKLKKTATGWMTTINGKELKVEGQITYYNRYKRQNVVKDLSVELDRLSEESVNNDISSWTKGRSGEALSLLKKRFSHRPVQEKFVCLNCGFETHADEQAALNIARSWLFLRSQEYKKYQTNKTTGNTDKRAFVETWQSFYRKKLKEVWKPAV

SEQ ID NO: 26933 - protein, 978 aa, Artificial Sequence
  CasX Variant
QEIKRINKIRRRLVKDSNTKKAGKTGPMKTLLVRVMTPDLRERLENLRKKPENIPQPISNTSRANLNKLLTDYTEMKKAILHVYWEEFQKDPVGLMSRVAQPASKKIDQNKLKPEMDEKGNLTTAGFACSQCGQPLFVYKLEQVSEKGKAYTNYFGRCNVAEHEKLILLAQLKPEKDSDEAVTYSLGKFGQRALDFYSIHVTKESTHPVKPLAQIAGNRYASGPVGKALSDACMGTIASFLSKYQDIIIEHQKVVKGNQKRLESLRELAGKENLEYPSVTLPPQPHTKEGVDAYNEVIARVRMWVNLNLWQKLKLSRDDAKPLLRLKGFPSFPLVERQANEVDWWDMVCNVKKLINEKKEDGKVFWQNLAGYKRQEALRPYLSSEEDRKKGKKFARYQLGDLLLHLEKKHGEDWGKVYDEAWERIDKKVEGLSKHIKLEEERRSEDAQSKAALTDWLRAKASFVIEGLKEADKDEFCRCELKLQKWYGDLRGKPFAIEAENSILDISGFSKQYNCAFIWQKDGVKKLNLYLIINYFKGGKLRFKKIKPEAFEANRFYTVINKKSGEIVPMEVNFNFDDPNLIILPLAFGKRQGREFIWNDLLSLETGSLKLANGRVIEKTLYNRRTRQDEPALFVALTFERREVLDSSNIKPMNLIGVDRGENIPAVIALTDPEGCPLSRFKDSLGNPTHILRIGESYKEKQRTIQAKKEVEQRRAGGYSRKYASKAKNLADDMVRNTARDLLYYAVTQDAMLIFENLSRGFGRQGKRTFMAERQYTRMEDWLTAKLKYEGLPSKTYLSKTLAQYTSKTCSNCGFTITSADYDRVLEKLKKTATGWMTTINGKELKVEGQITYYNRYKRQNVVKDLSVELDRLSEESVNNDISSWTKGRSGEALSLLKKRFSHRPVQEKFVCLNCGFETHADEQAALNIARSWLFLRSQEYKKYQTNKTTGNTDKRAFVETWQSFYRKKLKEVWKPAV

SEQ ID NO: 26934 - protein, 978 aa, Artificial Sequence
  CasX Variant
QEGKRINKIRRRLVKDSNTKKAGKTGPMKTLLVRVMTPDLRERLENLRKKPENIPQPISNTSRANLNKLLTDYTEMKKAILHVYWEEFQKDPVGLMSRVAQPASKKIDQNKLKPEMDEKGNLTTAGFACSQCGQPLFVYKLEQVSEKGKAYTNYFGRCNVAEHEKLILLAQLKPEKDSDEAVTYSLGKFGQRALDFYSIHVTKESTHPVKPLAQIAGNRYASGPVGKALSDACMGTIASFLSKYQDIIIEHQKVVKGNQKRLESLRELAGKENLEYPSVTLPPQPHTKEGVDAYNEVIARVRMWVNLNLWQKLKLSRDDAKPLLRLKGFPSFPLVERQANEVDWWDMVCNVKKLINEKKEDGKVFWQNLAGYKRQEALRPYLSSEEDRKKGKKFARYQLGDLLLHLEKKHGEDWGKVYDEAWERIDKKVEGLSKHIKLEEERRSEDAQSKAALTDWLRAKASFVIEGLKEADKDEFCRCELKLQKWYGDLRGKPFAIEAENSILDISGFSKQYNCAFIWQKDGVKKLNLYLIINYFKGGKLRFKKIKPEAFEANRFYTVINKKSGEIVPMEVNFNFDDPNLIILPLAFGKRQGREFIWNDLLSLETGSLKLANGRVIEKTLYNRRTRQDEPALFVALTFERREVLDSSNIKPMNLIGVDRGENIPAVIALTDPEGCPLSRFKDSLGNPTHILRIGESYKEKQRTIQAKKEVEQRRAGGYSRKYASKAKNLADDMVRNTARDLLYYAVTQDAMLIFENLSRGFGRQGKRTFMAERQYTRMEDWLTAKLAYEGLPSKTYLSKTLAQYTSKTCSNCGFTITSADYDRVLEKLKKTATGWMTTINGKELKVEGQITYYNRYKRQNVVKDLSVELDRLSEESVNNDISSWTKGRSGEALSLLKKRFSHRPVQEKFVCLNCGFETHADEQAALNIARSWLFLRSQEYKKYQTNKTTGNTDKRAFVETWQSFYRKKLKEVWKPAV

SEQ ID NO: 26935 - protein, 978 aa, Artificial Sequence
  CasX Variant
QEEKRINKIRRRLVKDSNTKKAGKTGPMKTLLVRVMTPDLRERLENLRKKPENIPQPISNTSRANLNKLLTDYTEMKKAILHVYWEEFQKDPVGLMSRVAQPASKKIDQNKLKPEMDEKGNLTTAGFACSQCGQPLFVYKLEQVSEKGKAYTNYFGRCNVAEHEKLILLAQLKPEKDSDEAVTYSLGKFGQRALDFYSIHVTKESTHPVKPLAQIAGNRYASGPVGKALSDACMGTIASFLSKYQDIIIEHQKVVKGNQKRLESLRELAGKENLEYPSVTLPPQPHTKEGVDAYNEVIARVRMWVNLNLWQKLKLSRDDAKPLLRLKGFPSFPLVERQANEVDWWDMVCNVKKLINEKKEDGKVFWQNLAGYKRQEALRPYLSSEEDRKKGKKFARYQLGDLLLHLEKKHGEDWGKVYDEAWERIDKKVEGLSKHIKLEEERRSEDAQSKAALTDWLRAKASFVIEGLKEADKDEFCRCELKLQKWYGDLRGKPFAIEAENSILDISGFSKQYNCAFIWQKDGVKKLNLYLIINYFKGGKLRFKKIKPEAFEANRFYTVINKKSGEIVPMEVNFNFDDPNLIILPLAFGKRQGREFIWNDLLSLETGSLKLANGRVIEKTLYNRRTRQDEPALFVALTFERREVLDSSNIKPMNLIGVDRGENIPAVIALTDPEGCPLSRFKDSLGNPTHILRIGESYKEKQRTIQAKKEVEQRRAGGYSRKYASKAKNLADDMVRNTARDLLYYAVTQDAMLIFENLSRGFGRQGKRTFMAERQYTRMEDWLTAKLAYEGLPSKTYLSKTLAQYTSKTCSNCGFTITSADYDRVLEKLKKTATGWMTTINGKELKVEGQITYYNRYKRQNVVKDLSVELDRLSEESVNNDISSWTKGRSGEALSLLKKRFSHRPVQEKFVCLNCGFETHADEQAALNIARSWLFLRSQEYKKYQTNKTTGNTDKRAFVETWQSFYRKKLKEVWKPAV

SEQ ID NO: 26936 - protein, 979 aa, Artificial Sequence
  CasX Variant
QEIGKRINKIRRRLVKDSNTKKAGKTGPMKTLLVRVMTPDLRERLENLRKKPENIPQPISNTSRANLNKLLTDYTEMKKAILHVYWEEFQKDPVGLMSRVAQPASKKIDQNKLKPEMDEKGNLTTAGFACSQCGQPLFVYKLEQVSEKGKAYTNYFGRCNVAEHEKLILLAQLKPEKDSDEAVTYSLGKFGQRALDFYSIHVTKESTHPVKPLAQIAGNRYASGPVGKALSDACMGTIASFLSKYQDIIIEHQKVVKGNQKRLESLRELAGKENLEYPSVTLPPQPHTKEGVDAYNEVIARVRMWVNLNLWQKLKLSRDDAKPLLRLKGFPSFPLVERQANEVDWWDMVCNVKKLINEKKEDGKVFWQNLAGYKRQEALRPYLSSEEDRKKGKKFARYQLGDLLLHLEKKHGEDWGKVYDEAWERIDKKVEGLSKHIKLEEERRSEDAQSKAALTDWLRAKASFVIEGLKEADKDEFCRCELKLQKWYGDLRGKPFAIEAENSILDISGFSKQYNCAFIWQKDGVKKLNLYLIINYFKGGKLRFKKIKPEAFEANRFYTVINKKSGEIVPMEVNFNFDDPNLIILPLAFGKRQGREFIWNDLLSLETGSLKLANGRVIEKTLYNRRTRQDEPALFVALTFERREVLDSSNIKPMNLIGVDRGENIPAVIALTDPEGCPLSRFKDSLGNPTHILRIGESYKEKQRTIQAKKEVEQRRAGGYSRKYASKAKNLADDMVRNTARDLLYYAVTQDAMLIFENLSRGFGRQGKRTFMAERQYTRMEDWLTAKLAYEGLPSKTYLSKTLAQYTSKTCSNCGFTITSADYDRVLEKLKKTATGWMTTINGKELKVEGQITYYNRYKRQNVVKDLSVELDRLSEESVNNDISSWTKGRSGEALSLLKKRFSHRPVQEKFVCLNCGFETHADEQAALNIARSWLFLRSQEYKKYQTNKTTGNTDKRAFVETWQSFYRKKLKEVWKPAV

SEQ ID NO: 26937 - protein, 978 aa, Artificial Sequence
  CasX Variant
QEIGRINKIRRRLVKDSNTKKAGKTGPMKTLLVRVMTPDLRERLENLRKKPENIPQPISNTSRANLNKLLTDYTEMKKAILHVYWEEFQKDPVGLMSRVAQPASKKIDQNKLKPEMDEKGNLTTAGFACSQCGQPLFVYKLEQVSEKGKAYTNYFGRCNVAEHEKLILLAQLKPEKDSDEAVTYSLGKFGQRALDFYSIHVTKESTHPVKPLAQIAGNRYASGPVGKALSDACMGTIASFLSKYQDIIIEHQKVVKGNQKRLESLRELAGKENLEYPSVTLPPQPHTKEGVDAYNEVIARVRMWVNLNLWQKLKLSRDDAKPLLRLKGFPSFPLVERQANEVDWWDMVCNVKKLINEKKEDGKVFWQNLAGYKRQEALRPYLSSEEDRKKGKKFARYQLGDLLLHLEKKHGEDWGKVYDEAWERIDKKVEGLSKHIKLEEERRSEDAQSKAALTDWLRAKASFVIEGLKEADKDEFCRCELKLQKWYGDLRGKPFAIEAENSILDISGFSKQYNCAFIWQKDGVKKLNLYLIINYFKGGKLRFKKIKPEAFEANRFYTVINKKSGEIVPMEVNFNFDDPNLIILPLAFGKRQGREFIWNDLLSLETGSLKLANGRVIEKTLYNRRTRQDEPALFVALTFERREVLDSSNIKPMNLIGVDRGENIPAVIALTDPEGCPLSRFKDSLGNPTHILRIGESYKEKQRTIQAKKEVEQRRAGGYSRKYASKAKNLADDMVRNTARDLLYYAVTQDAMLIFENLSRGFGRQGKRTFMAERQYTRMEDWLTAKLAYEGLPSKTYLSKTLAQYTSKTCSNCGFTITSADYDRVLEKLKKTATGWMTTINGKELKVEGQITYYNRYKRQNVVKDLSVELDRLSEESVNNDISSWTKGRSGEALSLLKKRFSHRPVQEKFVCLNCGFETHADEQAALNIARSWLFLRSQEYKKYQTNKTTGNTDKRAFVETWQSFYRKKLKEVWKPAV

SEQ ID NO: 26938 - protein, 978 aa, Artificial Sequence
  CasX Variant
QEISRINKIRRRLVKDSNTKKAGKTGPMKTLLVRVMTPDLRERLENLRKKPENIPQPISNTSRANLNKLLTDYTEMKKAILHVYWEEFQKDPVGLMSRVAQPASKKIDQNKLKPEMDEKGNLTTAGFACSQCGQPLFVYKLEQVSEKGKAYTNYFGRCNVAEHEKLILLAQLKPEKDSDEAVTYSLGKFGQRALDFYSIHVTKESTHPVKPLAQIAGNRYASGPVGKALSDACMGTIASFLSKYQDIIIEHQKVVKGNQKRLESLRELAGKENLEYPSVTLPPQPHTKEGVDAYNEVIARVRMWVNLNLWQKLKLSRDDAKPLLRLKGFPSFPLVERQANEVDWWDMVCNVKKLINEKKEDGKVFWQNLAGYKRQEALRPYLSSEEDRKKGKKFARYQLGDLLLHLEKKHGEDWGKVYDEAWERIDKKVEGLSKHIKLEEERRSEDAQSKAALTDWLRAKASFVIEGLKEADKDEFCRCELKLQKWYGDLRGKPFAIEAENSILDISGFSKQYNCAFIWQKDGVKKLNLYLIINYFKGGKLRFKKIKPEAFEANRFYTVINKKSGEIVPMEVNFNFDDPNLIILPLAFGKRQGREFIWNDLLSLETGSLKLANGRVIEKTLYNRRTRQDEPALFVALTFERREVLDSSNIKPMNLIGVDRGENIPAVIALTDPEGCPLSRFKDSLGNPTHILRIGESYKEKQRTIQAKKEVEQRRAGGYSRKYASKAKNLADDMVRNTARDLLYYAVTQDAMLIFENLSRGFGRQGKRTFMAERQYTRMEDWLTAKLAYEGLPSKTYLSKTLAQYTSKTCSNCGFTITSADYDRVLEKLKKTATGWMTTINGKELKVEGQITYYNRYKRQNVVKDLSVELDRLSEESVNNDISSWTKGRSGEALSLLKKRFSHRPVQEKFVCLNCGFETHADEQAALNIARSWLFLRSQEYKKYQTNKTTGNTDKRAFVETWQSFYRKKLKEVWKPAV

SEQ ID NO: 26939 - protein, 979 aa, Artificial Sequence
  CasX Variant
QEIKGRINKIRRRLVKDSNTKKAGKTGPMKTLLVRVMTPDLRERLENLRKKPENIPQPISNTSRANLNKLLTDYTEMKKAILHVYWEEFQKDPVGLMSRVAQPASKKIDQNKLKPEMDEKGNLTTAGFACSQCGQPLFVYKLEQVSEKGKAYTNYFGRCNVAEHEKLILLAQLKPEKDSDEAVTYSLGKFGQRALDFYSIHVTKESTHPVKPLAQIAGNRYASGPVGKALSDACMGTIASFLSKYQDIIIEHQKVVKGNQKRLESLRELAGKENLEYPSVTLPPQPHTKEGVDAYNEVIARVRMWVNLNLWQKLKLSRDDAKPLLRLKGFPSFPLVERQANEVDWWDMVCNVKKLINEKKEDGKVFWQNLAGYKRQEALRPYLSSEEDRKKGKKFARYQLGDLLLHLEKKHGEDWGKVYDEAWERIDKKVEGLSKHIKLEEERRSEDAQSKAALTDWLRAKASFVIEGLKEADKDEFCRCELKLQKWYGDLRGKPFAIEAENSILDISGFSKQYNCAFIWQKDGVKKLNLYLIINYFKGGKLRFKKIKPEAFEANRFYTVINKKSGEIVPMEVNFNFDDPNLIILPLAFGKRQGREFIWNDLLSLETGSLKLANGRVIEKTLYNRRTRQDEPALFVALTFERREVLDSSNIKPMNLIGVDRGENIPAVIALTDPEGCPLSRFKDSLGNPTHILRIGESYKEKQRTIQAKKEVEQRRAGGYSRKYASKAKNLADDMVRNTARDLLYYAVTQDAMLIFENLSRGFGRQGKRTFMAERQYTRMEDWLTAKLAYEGLPSKTYLSKTLAQYTSKTCSNCGFTITSADYDRVLEKLKKTATGWMTTINGKELKVEGQITYYNRYKRQNVVKDLSVELDRLSEESVNNDISSWTKGRSGEALSLLKKRFSHRPVQEKFVCLNCGFETHADEQAALNIARSWLFLRSQEYKKYQTNKTTGNTDKRAFVETWQSFYRKKLKEVWKPAV

SEQ ID NO: 26940 - protein, 978 aa, Artificial Sequence
  CasX Variant
QEIKSINKIRRRLVKDSNTKKAGKTGPMKTLLVRVMTPDLRERLENLRKKPENIPQPISNTSRANLNKLLTDYTEMKKAILHVYWEEFQKDPVGLMSRVAQPASKKIDQNKLKPEMDEKGNLTTAGFACSQCGQPLFVYKLEQVSEKGKAYTNYFGRCNVAEHEKLILLAQLKPEKDSDEAVTYSLGKFGQRALDFYSIHVTKESTHPVKPLAQIAGNRYASGPVGKALSDACMGTIASFLSKYQDIIIEHQKVVKGNQKRLESLRELAGKENLEYPSVTLPPQPHTKEGVDAYNEVIARVRMWVNLNLWQKLKLSRDDAKPLLRLKGFPSFPLVERQANEVDWWDMVCNVKKLINEKKEDGKVFWQNLAGYKRQEALRPYLSSEEDRKKGKKFARYQLGDLLLHLEKKHGEDWGKVYDEAWERIDKKVEGLSKHIKLEEERRSEDAQSKAALTDWLRAKASFVIEGLKEADKDEFCRCELKLQKWYGDLRGKPFAIEAENSILDISGFSKQYNCAFIWQKDGVKKLNLYLIINYFKGGKLRFKKIKPEAFEANRFYTVINKKSGEIVPMEVNFNFDDPNLIILPLAFGKRQGREFIWNDLLSLETGSLKLANGRVIEKTLYNRRTRQDEPALFVALTFERREVLDSSNIKPMNLIGVDRGENIPAVIALTDPEGCPLSRFKDSLGNPTHILRIGESYKEKQRTIQAKKEVEQRRAGGYSRKYASKAKNLADDMVRNTARDLLYYAVTQDAMLIFENLSRGFGRQGKRTFMAERQYTRMEDWLTAKLAYEGLPSKTYLSKTLAQYTSKTCSNCGFTITSADYDRVLEKLKKTATGWMTTINGKELKVEGQITYYNRYKRQNVVKDLSVELDRLSEESVNNDISSWTKGRSGEALSLLKKRFSHRPVQEKFVCLNCGFETHADEQAALNIARSWLFLRSQEYKKYQTNKTTGNTDKRAFVETWQSFYRKKLKEVWKPAV

SEQ ID NO: 26941 - protein, 978 aa, Artificial Sequence
  CasX Variant
QEIKRANKIRRRLVKDSNTKKAGKTGPMKTLLVRVMTPDLRERLENLRKKPENIPQPISNTSRANLNKLLTDYTEMKKAILHVYWEEFQKDPVGLMSRVAQPASKKIDQNKLKPEMDEKGNLTTAGFACSQCGQPLFVYKLEQVSEKGKAYTNYFGRCNVAEHEKLILLAQLKPEKDSDEAVTYSLGKFGQRALDFYSIHVTKESTHPVKPLAQIAGNRYASGPVGKALSDACMGTIASFLSKYQDIIIEHQKVVKGNQKRLESLRELAGKENLEYPSVTLPPQPHTKEGVDAYNEVIARVRMWVNLNLWQKLKLSRDDAKPLLRLKGFPSFPLVERQANEVDWWDMVCNVKKLINEKKEDGKVFWQNLAGYKRQEALRPYLSSEEDRKKGKKFARYQLGDLLLHLEKKHGEDWGKVYDEAWERIDKKVEGLSKHIKLEEERRSEDAQSKAALTDWLRAKASFVIEGLKEADKDEFCRCELKLQKWYGDLRGKPFAIEAENSILDISGFSKQYNCAFIWQKDGVKKLNLYLIINYFKGGKLRFKKIKPEAFEANRFYTVINKKSGEIVPMEVNFNFDDPNLIILPLAFGKRQGREFIWNDLLSLETGSLKLANGRVIEKTLYNRRTRQDEPALFVALTFERREVLDSSNIKPMNLIGVDRGENIPAVIALTDPEGCPLSRFKDSLGNPTHILRIGESYKEKQRTIQAKKEVEQRRAGGYSRKYASKAKNLADDMVRNTARDLLYYAVTQDAMLIFENLSRGFGRQGKRTFMAERQYTRMEDWLTAKLAYEGLPSKTYLSKTLAQYTSKTCSNCGFTITSADYDRVLEKLKKTATGWMTTINGKELKVEGQITYYNRYKRQNVVKDLSVELDRLSEESVNNDISSWTKGRSGEALSLLKKRFSHRPVQEKFVCLNCGFETHADEQAALNIARSWLFLRSQEYKKYQTNKTTGNTDKRAFVETWQSFYRKKLKEVWKPAV

SEQ ID NO: 26942 - protein, 979 aa, Artificial Sequence
  CasX Variant
QEIKRGINKIRRRLVKDSNTKKAGKTGPMKTLLVRVMTPDLRERLENLRKKPENIPQPISNTSRANLNKLLTDYTEMKKAILHVYWEEFQKDPVGLMSRVAQPASKKIDQNKLKPEMDEKGNLTTAGFACSQCGQPLFVYKLEQVSEKGKAYTNYFGRCNVAEHEKLILLAQLKPEKDSDEAVTYSLGKFGQRALDFYSIHVTKESTHPVKPLAQIAGNRYASGPVGKALSDACMGTIASFLSKYQDIIIEHQKVVKGNQKRLESLRELAGKENLEYPSVTLPPQPHTKEGVDAYNEVIARVRMWVNLNLWQKLKLSRDDAKPLLRLKGFPSFPLVERQANEVDWWDMVCNVKKLINEKKEDGKVFWQNLAGYKRQEALRPYLSSEEDRKKGKKFARYQLGDLLLHLEKKHGEDWGKVYDEAWERIDKKVEGLSKHIKLEEERRSEDAQSKAALTDWLRAKASFVIEGLKEADKDEFCRCELKLQKWYGDLRGKPFAIEAENSILDISGFSKQYNCAFIWQKDGVKKLNLYLIINYFKGGKLRFKKIKPEAFEANRFYTVINKKSGEIVPMEVNFNFDDPNLIILPLAFGKRQGREFIWNDLLSLETGSLKLANGRVIEKTLYNRRTRQDEPALFVALTFERREVLDSSNIKPMNLIGVDRGENIPAVIALTDPEGCPLSRFKDSLGNPTHILRIGESYKEKQRTIQAKKEVEQRRAGGYSRKYASKAKNLADDMVRNTARDLLYYAVTQDAMLIFENLSRGFGRQGKRTFMAERQYTRMEDWLTAKLAYEGLPSKTYLSKTLAQYTSKTCSNCGFTITSADYDRVLEKLKKTATGWMTTINGKELKVEGQITYYNRYKRQNVVKDLSVELDRLSEESVNNDISSWTKGRSGEALSLLKKRFSHRPVQEKFVCLNCGFETHADEQAALNIARSWLFLRSQEYKKYQTNKTTGNTDKRAFVETWQSFYRKKLKEVWKPAV

SEQ ID NO: 26943 - protein, 978 aa, Artificial Sequence
  CasX Variant
QEIKRISKIRRRLVKDSNTKKAGKTGPMKTLLVRVMTPDLRERLENLRKKPENIPQPISNTSRANLNKLLTDYTEMKKAILHVYWEEFQKDPVGLMSRVAQPASKKIDQNKLKPEMDEKGNLTTAGFACSQCGQPLFVYKLEQVSEKGKAYTNYFGRCNVAEHEKLILLAQLKPEKDSDEAVTYSLGKFGQRALDFYSIHVTKESTHPVKPLAQIAGNRYASGPVGKALSDACMGTIASFLSKYQDIIIEHQKVVKGNQKRLESLRELAGKENLEYPSVTLPPQPHTKEGVDAYNEVIARVRMWVNLNLWQKLKLSRDDAKPLLRLKGFPSFPLVERQANEVDWWDMVCNVKKLINEKKEDGKVFWQNLAGYKRQEALRPYLSSEEDRKKGKKFARYQLGDLLLHLEKKHGEDWGKVYDEAWERIDKKVEGLSKHIKLEEERRSEDAQSKAALTDWLRAKASFVIEGLKEADKDEFCRCELKLQKWYGDLRGKPFAIEAENSILDISGFSKQYNCAFIWQKDGVKKLNLYLIINYFKGGKLRFKKIKPEAFEANRFYTVINKKSGEIVPMEVNFNFDDPNLIILPLAFGKRQGREFIWNDLLSLETGSLKLANGRVIEKTLYNRRTRQDEPALFVALTFERREVLDSSNIKPMNLIGVDRGENIPAVIALTDPEGCPLSRFKDSLGNPTHILRIGESYKEKQRTIQAKKEVEQRRAGGYSRKYASKAKNLADDMVRNTARDLLYYAVTQDAMLIFENLSRGFGRQGKRTFMAERQYTRMEDWLTAKLAYEGLPSKTYLSKTLAQYTSKTCSNCGFTITSADYDRVLEKLKKTATGWMTTINGKELKVEGQITYYNRYKRQNVVKDLSVELDRLSEESVNNDISSWTKGRSGEALSLLKKRFSHRPVQEKFVCLNCGFETHADEQAALNIARSWLFLRSQEYKKYQTNKTTGNTDKRAFVETWQSFYRKKLKEVWKPAV

SEQ ID NO: 26944 - protein, 978 aa, Artificial Sequence
  CasX Variant
QEIKRINGIRRRLVKDSNTKKAGKTGPMKTLLVRVMTPDLRERLENLRKKPENIPQPISNTSRANLNKLLTDYTEMKKAILHVYWEEFQKDPVGLMSRVAQPASKKIDQNKLKPEMDEKGNLTTAGFACSQCGQPLFVYKLEQVSEKGKAYTNYFGRCNVAEHEKLILLAQLKPEKDSDEAVTYSLGKFGQRALDFYSIHVTKESTHPVKPLAQIAGNRYASGPVGKALSDACMGTIASFLSKYQDIIIEHQKVVKGNQKRLESLRELAGKENLEYPSVTLPPQPHTKEGVDAYNEVIARVRMWVNLNLWQKLKLSRDDAKPLLRLKGFPSFPLVERQANEVDWWDMVCNVKKLINEKKEDGKVFWQNLAGYKRQEALRPYLSSEEDRKKGKKFARYQLGDLLLHLEKKHGEDWGKVYDEAWERIDKKVEGLSKHIKLEEERRSEDAQSKAALTDWLRAKASFVIEGLKEADKDEFCRCELKLQKWYGDLRGKPFAIEAENSILDISGFSKQYNCAFIWQKDGVKKLNLYLIINYFKGGKLRFKKIKPEAFEANRFYTVINKKSGEIVPMEVNFNFDDPNLIILPLAFGKRQGREFIWNDLLSLETGSLKLANGRVIEKTLYNRRTRQDEPALFVALTFERREVLDSSNIKPMNLIGVDRGENIPAVIALTDPEGCPLSRFKDSLGNPTHILRIGESYKEKQRTIQAKKEVEQRRAGGYSRKYASKAKNLADDMVRNTARDLLYYAVTQDAMLIFENLSRGFGRQGKRTFMAERQYTRMEDWLTAKLAYEGLPSKTYLSKTLAQYTSKTCSNCGFTITSADYDRVLEKLKKTATGWMTTINGKELKVEGQITYYNRYKRQNVVKDLSVELDRLSEESVNNDISSWTKGRSGEALSLLKKRFSHRPVQEKFVCLNCGFETHADEQAALNIARSWLFLRSQEYKKYQTNKTTGNTDKRAFVETWQSFYRKKLKEVWKPAV

SEQ ID NO: 26945 - protein, 979 aa, Artificial Sequence
  CasX Variant
QEIKRINKIRRRLVKFDSNTKKAGKTGPMKTLLVRVMTPDLRERLENLRKKPENIPQPISNTSRANLNKLLTDYTEMKKAILHVYWEEFQKDPVGLMSRVAQPASKKIDQNKLKPEMDEKGNLTTAGFACSQCGQPLFVYKLEQVSEKGKAYTNYFGRCNVAEHEKLILLAQLKPEKDSDEAVTYSLGKFGQRALDFYSIHVTKESTHPVKPLAQIAGNRYASGPVGKALSDACMGTIASFLSKYQDIIIEHQKVVKGNQKRLESLRELAGKENLEYPSVTLPPQPHTKEGVDAYNEVIARVRMWVNLNLWQKLKLSRDDAKPLLRLKGFPSFPLVERQANEVDWWDMVCNVKKLINEKKEDGKVFWQNLAGYKRQEALRPYLSSEEDRKKGKKFARYQLGDLLLHLEKKHGEDWGKVYDEAWERIDKKVEGLSKHIKLEEERRSEDAQSKAALTDWLRAKASFVIEGLKEADKDEFCRCELKLQKWYGDLRGKPFAIEAENSILDISGFSKQYNCAFIWQKDGVKKLNLYLIINYFKGGKLRFKKIKPEAFEANRFYTVINKKSGEIVPMEVNFNFDDPNLIILPLAFGKRQGREFIWNDLLSLETGSLKLANGRVIEKTLYNRRTRQDEPALFVALTFERREVLDSSNIKPMNLIGVDRGENIPAVIALTDPEGCPLSRFKDSLGNPTHILRIGESYKEKQRTIQAKKEVEQRRAGGYSRKYASKAKNLADDMVRNTARDLLYYAVTQDAMLIFENLSRGFGRQGKRTFMAERQYTRMEDWLTAKLAYEGLPSKTYLSKTLAQYTSKTCSNCGFTITSADYDRVLEKLKKTATGWMTTINGKELKVEGQITYYNRYKRQNVVKDLSVELDRLSEESVNNDISSWTKGRSGEALSLLKKRFSHRPVQEKFVCLNCGFETHADEQAALNIARSWLFLRSQEYKKYQTNKTTGNTDKRAFVETWQSFYRKKLKEVWKPAV

SEQ ID NO: 26946 - protein, 979 aa, Artificial Sequence
  CasX Variant
QEIKRINKIRRRLVKDSFNTKKAGKTGPMKTLLVRVMTPDLRERLENLRKKPENIPQPISNTSRANLNKLLTDYTEMKKAILHVYWEEFQKDPVGLMSRVAQPASKKIDQNKLKPEMDEKGNLTTAGFACSQCGQPLFVYKLEQVSEKGKAYTNYFGRCNVAEHEKLILLAQLKPEKDSDEAVTYSLGKFGQRALDFYSIHVTKESTHPVKPLAQIAGNRYASGPVGKALSDACMGTIASFLSKYQDIIIEHQKVVKGNQKRLESLRELAGKENLEYPSVTLPPQPHTKEGVDAYNEVIARVRMWVNLNLWQKLKLSRDDAKPLLRLKGFPSFPLVERQANEVDWWDMVCNVKKLINEKKEDGKVFWQNLAGYKRQEALRPYLSSEEDRKKGKKFARYQLGDLLLHLEKKHGEDWGKVYDEAWERIDKKVEGLSKHIKLEEERRSEDAQSKAALTDWLRAKASFVIEGLKEADKDEFCRCELKLQKWYGDLRGKPFAIEAENSILDISGFSKQYNCAFIWQKDGVKKLNLYLIINYFKGGKLRFKKIKPEAFEANRFYTVINKKSGEIVPMEVNFNFDDPNLIILPLAFGKRQGREFIWNDLLSLETGSLKLANGRVIEKTLYNRRTRQDEPALFVALTFERREVLDSSNIKPMNLIGVDRGENIPAVIALTDPEGCPLSRFKDSLGNPTHILRIGESYKEKQRTIQAKKEVEQRRAGGYSRKYASKAKNLADDMVRNTARDLLYYAVTQDAMLIFENLSRGFGRQGKRTFMAERQYTRMEDWLTAKLAYEGLPSKTYLSKTLAQYTSKTCSNCGFTITSADYDRVLEKLKKTATGWMTTINGKELKVEGQITYYNRYKRQNVVKDLSVELDRLSEESVNNDISSWTKGRSGEALSLLKKRFSHRPVQEKFVCLNCGFETHADEQAALNIARSWLFLRSQEYKKYQTNKTTGNTDKRAFVETWQSFYRKKLKEVWKPAV

SEQ ID NO: 26947 - protein, 978 aa, Artificial Sequence
  CasX Variant
QEIKRINKIRRRLVKDSNTKKAGKTGPMKTLLVPVMTPDLRERLENLRKKPENIPQPISNTSRANLNKLLTDYTEMKKAILHVYWEEFQKDPVGLMSRVAQPASKKIDQNKLKPEMDEKGNLTTAGFACSQCGQPLFVYKLEQVSEKGKAYTNYFGRCNVAEHEKLILLAQLKPEKDSDEAVTYSLGKFGQRALDFYSIHVTKESTHPVKPLAQIAGNRYASGPVGKALSDACMGTIASFLSKYQDIIIEHQKVVKGNQKRLESLRELAGKENLEYPSVTLPPQPHTKEGVDAYNEVIARVRMWVNLNLWQKLKLSRDDAKPLLRLKGFPSFPLVERQANEVDWWDMVCNVKKLINEKKEDGKVFWQNLAGYKRQEALRPYLSSEEDRKKGKKFARYQLGDLLLHLEKKHGEDWGKVYDEAWERIDKKVEGLSKHIKLEEERRSEDAQSKAALTDWLRAKASFVIEGLKEADKDEFCRCELKLQKWYGDLRGKPFAIEAENSILDISGFSKQYNCAFIWQKDGVKKLNLYLIINYFKGGKLRFKKIKPEAFEANRFYTVINKKSGEIVPMEVNFNFDDPNLIILPLAFGKRQGREFIWNDLLSLETGSLKLANGRVIEKTLYNRRTRQDEPALFVALTFERREVLDSSNIKPMNLIGVDRGENIPAVIALTDPEGCPLSRFKDSLGNPTHILRIGESYKEKQRTIQAKKEVEQRRAGGYSRKYASKAKNLADDMVRNTARDLLYYAVTQDAMLIFENLSRGFGRQGKRTFMAERQYTRMEDWLTAKLAYEGLPSKTYLSKTLAQYTSKTCSNCGFTITSADYDRVLEKLKKTATGWMTTINGKELKVEGQITYYNRYKRQNVVKDLSVELDRLSEESVNNDISSWTKGRSGEALSLLKKRFSHRPVQEKFVCLNCGFETHADEQAALNIARSWLFLRSQEYKKYQTNKTTGNTDKRAFVETWQSFYRKKLKEVWKPAV

SEQ ID NO: 26948 - protein, 978 aa, Artificial Sequence
  CasX Variant
QEIKRINKIRRRLVKDSNTKKAGKTGPMKTLLVRVMTPDLRERLENLRKKPPNIPQPISNTSRANLNKLLTDYTEMKKAILHVYWEEFQKDPVGLMSRVAQPASKKIDQNKLKPEMDEKGNLTTAGFACSQCGQPLFVYKLEQVSEKGKAYTNYFGRCNVAEHEKLILLAQLKPEKDSDEAVTYSLGKFGQRALDFYSIHVTKESTHPVKPLAQIAGNRYASGPVGKALSDACMGTIASFLSKYQDIIIEHQKVVKGNQKRLESLRELAGKENLEYPSVTLPPQPHTKEGVDAYNEVIARVRMWVNLNLWQKLKLSRDDAKPLLRLKGFPSFPLVERQANEVDWWDMVCNVKKLINEKKEDGKVFWQNLAGYKRQEALRPYLSSEEDRKKGKKFARYQLGDLLLHLEKKHGEDWGKVYDEAWERIDKKVEGLSKHIKLEEERRSEDAQSKAALTDWLRAKASFVIEGLKEADKDEFCRCELKLQKWYGDLRGKPFAIEAENSILDISGFSKQYNCAFIWQKDGVKKLNLYLIINYFKGGKLRFKKIKPEAFEANRFYTVINKKSGEIVPMEVNFNFDDPNLIILPLAFGKRQGREFIWNDLLSLETGSLKLANGRVIEKTLYNRRTRQDEPALFVALTFERREVLDSSNIKPMNLIGVDRGENIPAVIALTDPEGCPLSRFKDSLGNPTHILRIGESYKEKQRTIQAKKEVEQRRAGGYSRKYASKAKNLADDMVRNTARDLLYYAVTQDAMLIFENLSRGFGRQGKRTFMAERQYTRMEDWLTAKLAYEGLPSKTYLSKTLAQYTSKTCSNCGFTITSADYDRVLEKLKKTATGWMTTINGKELKVEGQITYYNRYKRQNVVKDLSVELDRLSEESVNNDISSWTKGRSGEALSLLKKRFSHRPVQEKFVCLNCGFETHADEQAALNIARSWLFLRSQEYKKYQTNKTTGNTDKRAFVETWQSFYRKKLKEVWKPAV

SEQ ID NO: 26949 - protein, 979 aa, Artificial Sequence
  CasX Variant
QEIKRINKIRRRLVKDSNTKKAGKTGPMKTLLVRVMTPDLRERLENLRKKPENIPPQPISNTSRANLNKLLTDYTEMKKAILHVYWEEFQKDPVGLMSRVAQPASKKIDQNKLKPEMDEKGNLTTAGFACSQCGQPLFVYKLEQVSEKGKAYTNYFGRCNVAEHEKLILLAQLKPEKDSDEAVTYSLGKFGQRALDFYSIHVTKESTHPVKPLAQIAGNRYASGPVGKALSDACMGTIASFLSKYQDIIIEHQKVVKGNQKRLESLRELAGKENLEYPSVTLPPQPHTKEGVDAYNEVIARVRMWVNLNLWQKLKLSRDDAKPLLRLKGFPSFPLVERQANEVDWWDMVCNVKKLINEKKEDGKVFWQNLAGYKRQEALRPYLSSEEDRKKGKKFARYQLGDLLLHLEKKHGEDWGKVYDEAWERIDKKVEGLSKHIKLEEERRSEDAQSKAALTDWLRAKASFVIEGLKEADKDEFCRCELKLQKWYGDLRGKPFAIEAENSILDISGFSKQYNCAFIWQKDGVKKLNLYLIINYFKGGKLRFKKIKPEAFEANRFYTVINKKSGEIVPMEVNFNFDDPNLIILPLAFGKRQGREFIWNDLLSLETGSLKLANGRVIEKTLYNRRTRQDEPALFVALTFERREVLDSSNIKPMNLIGVDRGENIPAVIALTDPEGCPLSRFKDSLGNPTHILRIGESYKEKQRTIQAKKEVEQRRAGGYSRKYASKAKNLADDMVRNTARDLLYYAVTQDAMLIFENLSRGFGRQGKRTFMAERQYTRMEDWLTAKLAYEGLPSKTYLSKTLAQYTSKTCSNCGFTITSADYDRVLEKLKKTATGWMTTINGKELKVEGQITYYNRYKRQNVVKDLSVELDRLSEESVNNDISSWTKGRSGEALSLLKKRFSHRPVQEKFVCLNCGFETHADEQAALNIARSWLFLRSQEYKKYQTNKTTGNTDKRAFVETWQSFYRKKLKEVWKPAV

SEQ ID NO: 26950 - protein, 978 aa, Artificial Sequence
  CasX Variant
QEIKRINKIRRRLVKDSNTKKAGKTGPMKTLLVRVMTPDLRERLENLRKKPENIPPPISNTSRANLNKLLTDYTEMKKAILHVYWEEFQKDPVGLMSRVAQPASKKIDQNKLKPEMDEKGNLTTAGFACSQCGQPLFVYKLEQVSEKGKAYTNYFGRCNVAEHEKLILLAQLKPEKDSDEAVTYSLGKFGQRALDFYSIHVTKESTHPVKPLAQIAGNRYASGPVGKALSDACMGTIASFLSKYQDIIIEHQKVVKGNQKRLESLRELAGKENLEYPSVTLPPQPHTKEGVDAYNEVIARVRMWVNLNLWQKLKLSRDDAKPLLRLKGFPSFPLVERQANEVDWWDMVCNVKKLINEKKEDGKVFWQNLAGYKRQEALRPYLSSEEDRKKGKKFARYQLGDLLLHLEKKHGEDWGKVYDEAWERIDKKVEGLSKHIKLEEERRSEDAQSKAALTDWLRAKASFVIEGLKEADKDEFCRCELKLQKWYGDLRGKPFAIEAENSILDISGFSKQYNCAFIWQKDGVKKLNLYLIINYFKGGKLRFKKIKPEAFEANRFYTVINKKSGEIVPMEVNFNFDDPNLIILPLAFGKRQGREFIWNDLLSLETGSLKLANGRVIEKTLYNRRTRQDEPALFVALTFERREVLDSSNIKPMNLIGVDRGENIPAVIALTDPEGCPLSRFKDSLGNPTHILRIGESYKEKQRTIQAKKEVEQRRAGGYSRKYASKAKNLADDMVRNTARDLLYYAVTQDAMLIFENLSRGFGRQGKRTFMAERQYTRMEDWLTAKLAYEGLPSKTYLSKTLAQYTSKTCSNCGFTITSADYDRVLEKLKKTATGWMTTINGKELKVEGQITYYNRYKRQNVVKDLSVELDRLSEESVNNDISSWTKGRSGEALSLLKKRFSHRPVQEKFVCLNCGFETHADEQAALNIARSWLFLRSQEYKKYQTNKTTGNTDKRAFVETWQSFYRKKLKEVWKPAV

SEQ ID NO: 26951 - protein, 978 aa, Artificial Sequence
  CasX Variant
QEIKRINKIRRRLVKDSNTKKAGKTGPMKTLLVRVMTPDLRERLENLRKKPENIPQPISNTSSANLNKLLTDYTEMKKAILHVYWEEFQKDPVGLMSRVAQPASKKIDQNKLKPEMDEKGNLTTAGFACSQCGQPLFVYKLEQVSEKGKAYTNYFGRCNVAEHEKLILLAQLKPEKDSDEAVTYSLGKFGQRALDFYSIHVTKESTHPVKPLAQIAGNRYASGPVGKALSDACMGTIASFLSKYQDIIIEHQKVVKGNQKRLESLRELAGKENLEYPSVTLPPQPHTKEGVDAYNEVIARVRMWVNLNLWQKLKLSRDDAKPLLRLKGFPSFPLVERQANEVDWWDMVCNVKKLINEKKEDGKVFWQNLAGYKRQEALRPYLSSEEDRKKGKKFARYQLGDLLLHLEKKHGEDWGKVYDEAWERIDKKVEGLSKHIKLEEERRSEDAQSKAALTDWLRAKASFVIEGLKEADKDEFCRCELKLQKWYGDLRGKPFAIEAENSILDISGFSKQYNCAFIWQKDGVKKLNLYLIINYFKGGKLRFKKIKPEAFEANRFYTVINKKSGEIVPMEVNFNFDDPNLIILPLAFGKRQGREFIWNDLLSLETGSLKLANGRVIEKTLYNRRTRQDEPALFVALTFERREVLDSSNIKPMNLIGVDRGENIPAVIALTDPEGCPLSRFKDSLGNPTHILRIGESYKEKQRTIQAKKEVEQRRAGGYSRKYASKAKNLADDMVRNTARDLLYYAVTQDAMLIFENLSRGFGRQGKRTFMAERQYTRMEDWLTAKLAYEGLPSKTYLSKTLAQYTSKTCSNCGFTITSADYDRVLEKLKKTATGWMTTINGKELKVEGQITYYNRYKRQNVVKDLSVELDRLSEESVNNDISSWTKGRSGEALSLLKKRFSHRPVQEKFVCLNCGFETHADEQAALNIARSWLFLRSQEYKKYQTNKTTGNTDKRAFVETWQSFYRKKLKEVWKPAV

SEQ ID NO: 26952 - protein, 978 aa, Artificial Sequence
  CasX Variant
QEIKRINKIRRRLVKDSNTKKAGKTGPMKTLLVRVMTPDLRERLENLRKKPENIPQPISNTSQANLNKLLTDYTEMKKAILHVYWEEFQKDPVGLMSRVAQPASKKIDQNKLKPEMDEKGNLTTAGFACSQCGQPLFVYKLEQVSEKGKAYTNYFGRCNVAEHEKLILLAQLKPEKDSDEAVTYSLGKFGQRALDFYSIHVTKESTHPVKPLAQIAGNRYASGPVGKALSDACMGTIASFLSKYQDIIIEHQKVVKGNQKRLESLRELAGKENLEYPSVTLPPQPHTKEGVDAYNEVIARVRMWVNLNLWQKLKLSRDDAKPLLRLKGFPSFPLVERQANEVDWWDMVCNVKKLINEKKEDGKVFWQNLAGYKRQEALRPYLSSEEDRKKGKKFARYQLGDLLLHLEKKHGEDWGKVYDEAWERIDKKVEGLSKHIKLEEERRSEDAQSKAALTDWLRAKASFVIEGLKEADKDEFCRCELKLQKWYGDLRGKPFAIEAENSILDISGFSKQYNCAFIWQKDGVKKLNLYLIINYFKGGKLRFKKIKPEAFEANRFYTVINKKSGEIVPMEVNFNFDDPNLIILPLAFGKRQGREFIWNDLLSLETGSLKLANGRVIEKTLYNRRTRQDEPALFVALTFERREVLDSSNIKPMNLIGVDRGENIPAVIALTDPEGCPLSRFKDSLGNPTHILRIGESYKEKQRTIQAKKEVEQRRAGGYSRKYASKAKNLADDMVRNTARDLLYYAVTQDAMLIFENLSRGFGRQGKRTFMAERQYTRMEDWLTAKLAYEGLPSKTYLSKTLAQYTSKTCSNCGFTITSADYDRVLEKLKKTATGWMTTINGKELKVEGQITYYNRYKRQNVVKDLSVELDRLSEESVNNDISSWTKGRSGEALSLLKKRFSHRPVQEKFVCLNCGFETHADEQAALNIARSWLFLRSQEYKKYQTNKTTGNTDKRAFVETWQSFYRKKLKEVWKPAV

SEQ ID NO: 26953 - protein, 978 aa, Artificial Sequence
  CasX Variant
QEIKRINKIRRRLVKDSNTKKAGKTGPMKTLLVRVMTPDLRERLENLRKKPENIPQPISNTSRANLNKLLTDYTEMKKAITHVYWEEFQKDPVGLMSRVAQPASKKIDQNKLKPEMDEKGNLTTAGFACSQCGQPLFVYKLEQVSEKGKAYTNYFGRCNVAEHEKLILLAQLKPEKDSDEAVTYSLGKFGQRALDFYSIHVTKESTHPVKPLAQIAGNRYASGPVGKALSDACMGTIASFLSKYQDIIIEHQKVVKGNQKRLESLRELAGKENLEYPSVTLPPQPHTKEGVDAYNEVIARVRMWVNLNLWQKLKLSRDDAKPLLRLKGFPSFPLVERQANEVDWWDMVCNVKKLINEKKEDGKVFWQNLAGYKRQEALRPYLSSEEDRKKGKKFARYQLGDLLLHLEKKHGEDWGKVYDEAWERIDKKVEGLSKHIKLEEERRSEDAQSKAALTDWLRAKASFVIEGLKEADKDEFCRCELKLQKWYGDLRGKPFAIEAENSILDISGFSKQYNCAFIWQKDGVKKLNLYLIINYFKGGKLRFKKIKPEAFEANRFYTVINKKSGEIVPMEVNFNFDDPNLIILPLAFGKRQGREFIWNDLLSLETGSLKLANGRVIEKTLYNRRTRQDEPALFVALTFERREVLDSSNIKPMNLIGVDRGENIPAVIALTDPEGCPLSRFKDSLGNPTHILRIGESYKEKQRTIQAKKEVEQRRAGGYSRKYASKAKNLADDMVRNTARDLLYYAVTQDAMLIFENLSRGFGRQGKRTFMAERQYTRMEDWLTAKLAYEGLPSKTYLSKTLAQYTSKTCSNCGFTITSADYDRVLEKLKKTATGWMTTINGKELKVEGQITYYNRYKRQNVVKDLSVELDRLSEESVNNDISSWTKGRSGEALSLLKKRFSHRPVQEKFVCLNCGFETHADEQAALNIARSWLFLRSQEYKKYQTNKTTGNTDKRAFVETWQSFYRKKLKEVWKPAV

SEQ ID NO: 26954 - protein, 978 aa, Artificial Sequence
  CasX Variant
QEIKRINKIRRRLVKDSNTKKAGKTGPMKTLLVRVMTPDLRERLENLRKKPENIPQPISNTSRANLNKLLTDYTEMKKAILHVYGEEFQKDPVGLMSRVAQPASKKIDQNKLKPEMDEKGNLTTAGFACSQCGQPLFVYKLEQVSEKGKAYTNYFGRCNVAEHEKLILLAQLKPEKDSDEAVTYSLGKFGQRALDFYSIHVTKESTHPVKPLAQIAGNRYASGPVGKALSDACMGTIASFLSKYQDIIIEHQKVVKGNQKRLESLRELAGKENLEYPSVTLPPQPHTKEGVDAYNEVIARVRMWVNLNLWQKLKLSRDDAKPLLRLKGFPSFPLVERQANEVDWWDMVCNVKKLINEKKEDGKVFWQNLAGYKRQEALRPYLSSEEDRKKGKKFARYQLGDLLLHLEKKHGEDWGKVYDEAWERIDKKVEGLSKHIKLEEERRSEDAQSKAALTDWLRAKASFVIEGLKEADKDEFCRCELKLQKWYGDLRGKPFAIEAENSILDISGFSKQYNCAFIWQKDGVKKLNLYLIINYFKGGKLRFKKIKPEAFEANRFYTVINKKSGEIVPMEVNFNFDDPNLIILPLAFGKRQGREFIWNDLLSLETGSLKLANGRVIEKTLYNRRTRQDEPALFVALTFERREVLDSSNIKPMNLIGVDRGENIPAVIALTDPEGCPLSRFKDSLGNPTHILRIGESYKEKQRTIQAKKEVEQRRAGGYSRKYASKAKNLADDMVRNTARDLLYYAVTQDAMLIFENLSRGFGRQGKRTFMAERQYTRMEDWLTAKLAYEGLPSKTYLSKTLAQYTSKTCSNCGFTITSADYDRVLEKLKKTATGWMTTINGKELKVEGQITYYNRYKRQNVVKDLSVELDRLSEESVNNDISSWTKGRSGEALSLLKKRFSHRPVQEKFVCLNCGFETHADEQAALNIARSWLFLRSQEYKKYQTNKTTGNTDKRAFVETWQSFYRKKLKEVWKPAV

SEQ ID NO: 26955 - protein, 978 aa, Artificial Sequence
  CasX Variant
QEIKRINKIRRRLVKDSNTKKAGKTGPMKTLLVRVMTPDLRERLENLRKKPENIPQPISNTSRANLNKLLTDYTEMKKAILHVYDEEFQKDPVGLMSRVAQPASKKIDQNKLKPEMDEKGNLTTAGFACSQCGQPLFVYKLEQVSEKGKAYTNYFGRCNVAEHEKLILLAQLKPEKDSDEAVTYSLGKFGQRALDFYSIHVTKESTHPVKPLAQIAGNRYASGPVGKALSDACMGTIASFLSKYQDIIIEHQKVVKGNQKRLESLRELAGKENLEYPSVTLPPQPHTKEGVDAYNEVIARVRMWVNLNLWQKLKLSRDDAKPLLRLKGFPSFPLVERQANEVDWWDMVCNVKKLINEKKEDGKVFWQNLAGYKRQEALRPYLSSEEDRKKGKKFARYQLGDLLLHLEKKHGEDWGKVYDEAWERIDKKVEGLSKHIKLEEERRSEDAQSKAALTDWLRAKASFVIEGLKEADKDEFCRCELKLQKWYGDLRGKPFAIEAENSILDISGFSKQYNCAFIWQKDGVKKLNLYLIINYFKGGKLRFKKIKPEAFEANRFYTVINKKSGEIVPMEVNFNFDDPNLIILPLAFGKRQGREFIWNDLLSLETGSLKLANGRVIEKTLYNRRTRQDEPALFVALTFERREVLDSSNIKPMNLIGVDRGENIPAVIALTDPEGCPLSRFKDSLGNPTHILRIGESYKEKQRTIQAKKEVEQRRAGGYSRKYASKAKNLADDMVRNTARDLLYYAVTQDAMLIFENLSRGFGRQGKRTFMAERQYTRMEDWLTAKLAYEGLPSKTYLSKTLAQYTSKTCSNCGFTITSADYDRVLEKLKKTATGWMTTINGKELKVEGQITYYNRYKRQNVVKDLSVELDRLSEESVNNDISSWTKGRSGEALSLLKKRFSHRPVQEKFVCLNCGFETHADEQAALNIARSWLFLRSQEYKKYQTNKTTGNTDKRAFVETWQSFYRKKLKEVWKPAV

SEQ ID NO: 26956 - protein, 978 aa, Artificial Sequence
  CasX Variant
QEIKRINKIRRRLVKDSNTKKAGKTGPMKTLLVRVMTPDLRERLENLRKKPENIPQPISNTSRANLNKLLTDYTEMKKAILHVYAEEFQKDPVGLMSRVAQPASKKIDQNKLKPEMDEKGNLTTAGFACSQCGQPLFVYKLEQVSEKGKAYTNYFGRCNVAEHEKLILLAQLKPEKDSDEAVTYSLGKFGQRALDFYSIHVTKESTHPVKPLAQIAGNRYASGPVGKALSDACMGTIASFLSKYQDIIIEHQKVVKGNQKRLESLRELAGKENLEYPSVTLPPQPHTKEGVDAYNEVIARVRMWVNLNLWQKLKLSRDDAKPLLRLKGFPSFPLVERQANEVDWWDMVCNVKKLINEKKEDGKVFWQNLAGYKRQEALRPYLSSEEDRKKGKKFARYQLGDLLLHLEKKHGEDWGKVYDEAWERIDKKVEGLSKHIKLEEERRSEDAQSKAALTDWLRAKASFVIEGLKEADKDEFCRCELKLQKWYGDLRGKPFAIEAENSILDISGFSKQYNCAFIWQKDGVKKLNLYLIINYFKGGKLRFKKIKPEAFEANRFYTVINKKSGEIVPMEVNFNFDDPNLIILPLAFGKRQGREFIWNDLLSLETGSLKLANGRVIEKTLYNRRTRQDEPALFVALTFERREVLDSSNIKPMNLIGVDRGENIPAVIALTDPEGCPLSRFKDSLGNPTHILRIGESYKEKQRTIQAKKEVEQRRAGGYSRKYASKAKNLADDMVRNTARDLLYYAVTQDAMLIFENLSRGFGRQGKRTFMAERQYTRMEDWLTAKLAYEGLPSKTYLSKTLAQYTSKTCSNCGFTITSADYDRVLEKLKKTATGWMTTINGKELKVEGQITYYNRYKRQNVVKDLSVELDRLSEESVNNDISSWTKGRSGEALSLLKKRFSHRPVQEKFVCLNCGFETHADEQAALNIARSWLFLRSQEYKKYQTNKTTGNTDKRAFVETWQSFYRKKLKEVWKPAV

SEQ ID NO: 26957 - protein, 978 aa, Artificial Sequence
  CasX Variant
QEIKRINKIRRRLVKDSNTKKAGKTGPMKTLLVRVMTPDLRERLENLRKKPENIPQPISNTSRANLNKLLTDYTEMKKAILHVYREEFQKDPVGLMSRVAQPASKKIDQNKLKPEMDEKGNLTTAGFACSQCGQPLFVYKLEQVSEKGKAYTNYFGRCNVAEHEKLILLAQLKPEKDSDEAVTYSLGKFGQRALDFYSIHVTKESTHPVKPLAQIAGNRYASGPVGKALSDACMGTIASFLSKYQDIIIEHQKVVKGNQKRLESLRELAGKENLEYPSVTLPPQPHTKEGVDAYNEVIARVRMWVNLNLWQKLKLSRDDAKPLLRLKGFPSFPLVERQANEVDWWDMVCNVKKLINEKKEDGKVFWQNLAGYKRQEALRPYLSSEEDRKKGKKFARYQLGDLLLHLEKKHGEDWGKVYDEAWERIDKKVEGLSKHIKLEEERRSEDAQSKAALTDWLRAKASFVIEGLKEADKDEFCRCELKLQKWYGDLRGKPFAIEAENSILDISGFSKQYNCAFIWQKDGVKKLNLYLIINYFKGGKLRFKKIKPEAFEANRFYTVINKKSGEIVPMEVNFNFDDPNLIILPLAFGKRQGREFIWNDLLSLETGSLKLANGRVIEKTLYNRRTRQDEPALFVALTFERREVLDSSNIKPMNLIGVDRGENIPAVIALTDPEGCPLSRFKDSLGNPTHILRIGESYKEKQRTIQAKKEVEQRRAGGYSRKYASKAKNLADDMVRNTARDLLYYAVTQDAMLIFENLSRGFGRQGKRTFMAERQYTRMEDWLTAKLAYEGLPSKTYLSKTLAQYTSKTCSNCGFTITSADYDRVLEKLKKTATGWMTTINGKELKVEGQITYYNRYKRQNVVKDLSVELDRLSEESVNNDISSWTKGRSGEALSLLKKRFSHRPVQEKFVCLNCGFETHADEQAALNIARSWLFLRSQEYKKYQTNKTTGNTDKRAFVETWQSFYRKKLKEVWKPAV

SEQ ID NO: 26958 - protein, 978 aa, Artificial Sequence
  CasX Variant
QEIKRINKIRRRLVKDSNTKKAGKTGPMKTLLVRVMTPDLRERLENLRKKPENIPQPISNTSRANLNKLLTDYTEMKKAILHVYWEEFQKDPVGLMSRVAQPASKKIDQNKLKPEMDEKGNLTTAGFACSQCGQPLFVYKLEQVSEKGKAYTNYFGRCNVAEHEKLIKLAQLKPEKDSDEAVTYSLGKFGQRALDFYSIHVTKESTHPVKPLAQIAGNRYASGPVGKALSDACMGTIASFLSKYQDIIIEHQKVVKGNQKRLESLRELAGKENLEYPSVTLPPQPHTKEGVDAYNEVIARVRMWVNLNLWQKLKLSRDDAKPLLRLKGFPSFPLVERQANEVDWWDMVCNVKKLINEKKEDGKVFWQNLAGYKRQEALRPYLSSEEDRKKGKKFARYQLGDLLLHLEKKHGEDWGKVYDEAWERIDKKVEGLSKHIKLEEERRSEDAQSKAALTDWLRAKASFVIEGLKEADKDEFCRCELKLQKWYGDLRGKPFAIEAENSILDISGFSKQYNCAFIWQKDGVKKLNLYLIINYFKGGKLRFKKIKPEAFEANRFYTVINKKSGEIVPMEVNFNFDDPNLIILPLAFGKRQGREFIWNDLLSLETGSLKLANGRVIEKTLYNRRTRQDEPALFVALTFERREVLDSSNIKPMNLIGVDRGENIPAVIALTDPEGCPLSRFKDSLGNPTHILRIGESYKEKQRTIQAKKEVEQRRAGGYSRKYASKAKNLADDMVRNTARDLLYYAVTQDAMLIFENLSRGFGRQGKRTFMAERQYTRMEDWLTAKLAYEGLPSKTYLSKTLAQYTSKTCSNCGFTITSADYDRVLEKLKKTATGWMTTINGKELKVEGQITYYNRYKRQNVVKDLSVELDRLSEESVNNDISSWTKGRSGEALSLLKKRFSHRPVQEKFVCLNCGFETHADEQAALNIARSWLFLRSQEYKKYQTNKTTGNTDKRAFVETWQSFYRKKLKEVWKPAV

SEQ ID NO: 26959 - protein, 978 aa, Artificial Sequence
  CasX Variant
QEIKRINKIRRRLVKDSNTKKAGKTGPMKTLLVRVMTPDLRERLENLRKKPENIPQPISNTSRANLNKLLTDYTEMKKAILHVYWEEFQKDPVGLMSRVAQPASKKIDQNKLKPEMDEKGNLTTAGFACSQCGQPLFVYKLEQVSEKGKAYTNYFGRCNVAEHEKLILLYQLKPEKDSDEAVTYSLGKFGQRALDFYSIHVTKESTHPVKPLAQIAGNRYASGPVGKALSDACMGTIASFLSKYQDIIIEHQKVVKGNQKRLESLRELAGKENLEYPSVTLPPQPHTKEGVDAYNEVIARVRMWVNLNLWQKLKLSRDDAKPLLRLKGFPSFPLVERQANEVDWWDMVCNVKKLINEKKEDGKVFWQNLAGYKRQEALRPYLSSEEDRKKGKKFARYQLGDLLLHLEKKHGEDWGKVYDEAWERIDKKVEGLSKHIKLEEERRSEDAQSKAALTDWLRAKASFVIEGLKEADKDEFCRCELKLQKWYGDLRGKPFAIEAENSILDISGFSKQYNCAFIWQKDGVKKLNLYLIINYFKGGKLRFKKIKPEAFEANRFYTVINKKSGEIVPMEVNFNFDDPNLIILPLAFGKRQGREFIWNDLLSLETGSLKLANGRVIEKTLYNRRTRQDEPALFVALTFERREVLDSSNIKPMNLIGVDRGENIPAVIALTDPEGCPLSRFKDSLGNPTHILRIGESYKEKQRTIQAKKEVEQRRAGGYSRKYASKAKNLADDMVRNTARDLLYYAVTQDAMLIFENLSRGFGRQGKRTFMAERQYTRMEDWLTAKLAYEGLPSKTYLSKTLAQYTSKTCSNCGFTITSADYDRVLEKLKKTATGWMTTINGKELKVEGQITYYNRYKRQNVVKDLSVELDRLSEESVNNDISSWTKGRSGEALSLLKKRFSHRPVQEKFVCLNCGFETHADEQAALNIARSWLFLRSQEYKKYQTNKTTGNTDKRAFVETWQSFYRKKLKEVWKPAV

SEQ ID NO: 26960 - protein, 978 aa, Artificial Sequence
  CasX Variant
QEIKRINKIRRRLVKDSNTKKAGKTGPMKTLLVRVMTPDLRERLENLRKKPENIPQPISNTSRANLNKLLTDYTEMKKAILHVYWEEFQKDPVGLMSRVAQPASKKIDQNKLKPEMDEKGNLTTAGFACSQCGQPLFVYKLEQVSEKGKAYTNYFGRCNVAEHEKLILLSQLKPEKDSDEAVTYSLGKFGQRALDFYSIHVTKESTHPVKPLAQIAGNRYASGPVGKALSDACMGTIASFLSKYQDIIIEHQKVVKGNQKRLESLRELAGKENLEYPSVTLPPQPHTKEGVDAYNEVIARVRMWVNLNLWQKLKLSRDDAKPLLRLKGFPSFPLVERQANEVDWWDMVCNVKKLINEKKEDGKVFWQNLAGYKRQEALRPYLSSEEDRKKGKKFARYQLGDLLLHLEKKHGEDWGKVYDEAWERIDKKVEGLSKHIKLEEERRSEDAQSKAALTDWLRAKASFVIEGLKEADKDEFCRCELKLQKWYGDLRGKPFAIEAENSILDISGFSKQYNCAFIWQKDGVKKLNLYLIINYFKGGKLRFKKIKPEAFEANRFYTVINKKSGEIVPMEVNFNFDDPNLIILPLAFGKRQGREFIWNDLLSLETGSLKLANGRVIEKTLYNRRTRQDEPALFVALTFERREVLDSSNIKPMNLIGVDRGENIPAVIALTDPEGCPLSRFKDSLGNPTHILRIGESYKEKQRTIQAKKEVEQRRAGGYSRKYASKAKNLADDMVRNTARDLLYYAVTQDAMLIFENLSRGFGRQGKRTFMAERQYTRMEDWLTAKLAYEGLPSKTYLSKTLAQYTSKTCSNCGFTITSADYDRVLEKLKKTATGWMTTINGKELKVEGQITYYNRYKRQNVVKDLSVELDRLSEESVNNDISSWTKGRSGEALSLLKKRFSHRPVQEKFVCLNCGFETHADEQAALNIARSWLFLRSQEYKKYQTNKTTGNTDKRAFVETWQSFYRKKLKEVWKPAV

SEQ ID NO: 26961 - protein, 978 aa, Artificial Sequence
  CasX Variant
QEIKRINKIRRRLVKDSNTKKAGKTGPMKTLLVRVMTPDLRERLENLRKKPENIPQPISNTSRANLNKLLTDYTEMKKAILHVYWEEFQKDPVGLMSRVAQPASKKIDQNKLKPEMDEKGNLTTAGFACSQCGQPLFVYKLEQVSEKGKAYTNYFGRCNVAEHEKLILLAQLKPPKDSDEAVTYSLGKFGQRALDFYSIHVTKESTHPVKPLAQIAGNRYASGPVGKALSDACMGTIASFLSKYQDIIIEHQKVVKGNQKRLESLRELAGKENLEYPSVTLPPQPHTKEGVDAYNEVIARVRMWVNLNLWQKLKLSRDDAKPLLRLKGFPSFPLVERQANEVDWWDMVCNVKKLINEKKEDGKVFWQNLAGYKRQEALRPYLSSEEDRKKGKKFARYQLGDLLLHLEKKHGEDWGKVYDEAWERIDKKVEGLSKHIKLEEERRSEDAQSKAALTDWLRAKASFVIEGLKEADKDEFCRCELKLQKWYGDLRGKPFAIEAENSILDISGFSKQYNCAFIWQKDGVKKLNLYLIINYFKGGKLRFKKIKPEAFEANRFYTVINKKSGEIVPMEVNFNFDDPNLIILPLAFGKRQGREFIWNDLLSLETGSLKLANGRVIEKTLYNRRTRQDEPALFVALTFERREVLDSSNIKPMNLIGVDRGENIPAVIALTDPEGCPLSRFKDSLGNPTHILRIGESYKEKQRTIQAKKEVEQRRAGGYSRKYASKAKNLADDMVRNTARDLLYYAVTQDAMLIFENLSRGFGRQGKRTFMAERQYTRMEDWLTAKLAYEGLPSKTYLSKTLAQYTSKTCSNCGFTITSADYDRVLEKLKKTATGWMTTINGKELKVEGQITYYNRYKRQNVVKDLSVELDRLSEESVNNDISSWTKGRSGEALSLLKKRFSHRPVQEKFVCLNCGFETHADEQAALNIARSWLFLRSQEYKKYQTNKTTGNTDKRAFVETWQSFYRKKLKEVWKPAV

SEQ ID NO: 26962 - protein, 977 aa, Artificial Sequence
  CasX Variant
QEIKRINKIRRRLVKDSNTKKAGKTGPMKTLLVRVMTPDLRERLENLRKKPENIPQPISNTSRANLNKLLTDYTEMKKAILHVYWEEFQKDPVGLMSRVAQPASKKIDQNKLKPEMDEKGNLTTAGFACSQCGQPLFVYKLEQVSEKGKAYTNYFGRCNVAEHEKLILLAQLKPEKDSDEAVTYSLGKFGQRALDFYSIHVTKESTHPVKPLAQIAGNRYASPVGKALSDACMGTIASFLSKYQDIIIEHQKVVKGNQKRLESLRELAGKENLEYPSVTLPPQPHTKEGVDAYNEVIARVRMWVNLNLWQKLKLSRDDAKPLLRLKGFPSFPLVERQANEVDWWDMVCNVKKLINEKKEDGKVFWQNLAGYKRQEALRPYLSSEEDRKKGKKFARYQLGDLLLHLEKKHGEDWGKVYDEAWERIDKKVEGLSKHIKLEEERRSEDAQSKAALTDWLRAKASFVIEGLKEADKDEFCRCELKLQKWYGDLRGKPFAIEAENSILDISGFSKQYNCAFIWQKDGVKKLNLYLIINYFKGGKLRFKKIKPEAFEANRFYTVINKKSGEIVPMEVNFNFDDPNLIILPLAFGKRQGREFIWNDLLSLETGSLKLANGRVIEKTLYNRRTRQDEPALFVALTFERREVLDSSNIKPMNLIGVDRGENIPAVIALTDPEGCPLSRFKDSLGNPTHILRIGESYKEKQRTIQAKKEVEQRRAGGYSRKYASKAKNLADDMVRNTARDLLYYAVTQDAMLIFENLSRGFGRQGKRTFMAERQYTRMEDWLTAKLAYEGLPSKTYLSKTLAQYTSKTCSNCGFTITSADYDRVLEKLKKTATGWMTTINGKELKVEGQITYYNRYKRQNVVKDLSVELDRLSEESVNNDISSWTKGRSGEALSLLKKRFSHRPVQEKFVCLNCGFETHADEQAALNIARSWLFLRSQEYKKYQTNKTTGNTDKRAFVETWQSFYRKKLKEVWKPAV

SEQ ID NO: 26963 - protein, 978 aa, Artificial Sequence; identical to SEQ ID NO: 26911
  CasX Variant

SEQ ID NO: 26964 - protein, 978 aa, Artificial Sequence
  CasX Variant
QEIKRINKIRRRLVKDSNTKKAGKTGPMKTLLVRVMTPDLRERLENLRKKPENIPQPISNTSRANLNKLLTDYTEMKKAILHVYWEEFQKDPVGLMSRVAQPASKKIDQNKLKPEMDEKGNLTTAGFACSQCGQPLFVYKLEQVSEKGKAYTNYFGRCNVAEHEKLILLAQLKPEKDSDEAVTYSLGKFGQRALDFYSIHVTKESTHPVKPLAQIAGNRYASGPVGKALSDACMGTIASFLSKYQDIIIEHQKVVKGNQKRLESLRELAGKENLEYPSVTLPPQPHTGEGVDAYNEVIARVRMWVNLNLWQKLKLSRDDAKPLLRLKGFPSFPLVERQANEVDWWDMVCNVKKLINEKKEDGKVFWQNLAGYKRQEALRPYLSSEEDRKKGKKFARYQLGDLLLHLEKKHGEDWGKVYDEAWERIDKKVEGLSKHIKLEEERRSEDAQSKAALTDWLRAKASFVIEGLKEADKDEFCRCELKLQKWYGDLRGKPFAIEAENSILDISGFSKQYNCAFIWQKDGVKKLNLYLIINYFKGGKLRFKKIKPEAFEANRFYTVINKKSGEIVPMEVNFNFDDPNLIILPLAFGKRQGREFIWNDLLSLETGSLKLANGRVIEKTLYNRRTRQDEPALFVALTFERREVLDSSNIKPMNLIGVDRGENIPAVIALTDPEGCPLSRFKDSLGNPTHILRIGESYKEKQRTIQAKKEVEQRRAGGYSRKYASKAKNLADDMVRNTARDLLYYAVTQDAMLIFENLSRGFGRQGKRTFMAERQYTRMEDWLTAKLAYEGLPSKTYLSKTLAQYTSKTCSNCGFTITSADYDRVLEKLKKTATGWMTTINGKELKVEGQITYYNRYKRQNVVKDLSVELDRLSEESVNNDISSWTKGRSGEALSLLKKRFSHRPVQEKFVCLNCGFETHADEQAALNIARSWLFLRSQEYKKYQTNKTTGNTDKRAFVETWQSFYRKKLKEVWKPAV

SEQ ID NO: 26965 - protein, 978 aa, Artificial Sequence
  CasX Variant
QEIKRINKIRRRLVKDSNTKKAGKTGPMKTLLVRVMTPDLRERLENLRKKPENIPQPISNTSRANLNKLLTDYTEMKKAILHVYWEEFQKDPVGLMSRVAQPASKKIDQNKLKPEMDEKGNLTTAGFACSQCGQPLFVYKLEQVSEKGKAYTNYFGRCNVAEHEKLILLAQLKPEKDSDEAVTYSLGKFGQRALDFYSIHVTKESTHPVKPLAQIAGNRYASGPVGKALSDACMGTIASFLSKYQDIIIEHQKVVKGNQKRLESLRELAGKENLEYPSVTLPPQPHTSEGVDAYNEVIARVRMWVNLNLWQKLKLSRDDAKPLLRLKGFPSFPLVERQANEVDWWDMVCNVKKLINEKKEDGKVFWQNLAGYKRQEALRPYLSSEEDRKKGKKFARYQLGDLLLHLEKKHGEDWGKVYDEAWERIDKKVEGLSKHIKLEEERRSEDAQSKAALTDWLRAKASFVIEGLKEADKDEFCRCELKLQKWYGDLRGKPFAIEAENSILDISGFSKQYNCAFIWQKDGVKKLNLYLIINYFKGGKLRFKKIKPEAFEANRFYTVINKKSGEIVPMEVNFNFDDPNLIILPLAFGKRQGREFIWNDLLSLETGSLKLANGRVIEKTLYNRRTRQDEPALFVALTFERREVLDSSNIKPMNLIGVDRGENIPAVIALTDPEGCPLSRFKDSLGNPTHILRIGESYKEKQRTIQAKKEVEQRRAGGYSRKYASKAKNLADDMVRNTARDLLYYAVTQDAMLIFENLSRGFGRQGKRTFMAERQYTRMEDWLTAKLAYEGLPSKTYLSKTLAQYTSKTCSNCGFTITSADYDRVLEKLKKTATGWMTTINGKELKVEGQITYYNRYKRQNVVKDLSVELDRLSEESVNNDISSWTKGRSGEALSLLKKRFSHRPVQEKFVCLNCGFETHADEQAALNIARSWLFLRSQEYKKYQTNKTTGNTDKRAFVETWQSFYRKKLKEVWKPAV

SEQ ID NO: 26966 - protein, 978 aa, Artificial Sequence
  CasX Variant
QEIKRINKIRRRLVKDSNTKKAGKTGPMKTLLVRVMTPDLRERLENLRKKPENIPQPISNTSRANLNKLLTDYTEMKKAILHVYWEEFQKDPVGLMSRVAQPASKKIDQNKLKPEMDEKGNLTTAGFACSQCGQPLFVYKLEQVSEKGKAYTNYFGRCNVAEHEKLILLAQLKPEKDSDEAVTYSLGKFGQRALDFYSIHVTKESTHPVKPLAQIAGNRYASGPVGKALSDACMGTIASFLSKYQDIIIEHQKVVKGNQKRLESLRELAGKENLEYPSVTLPPQPHTKEGLDAYNEVIARVRMWVNLNLWQKLKLSRDDAKPLLRLKGFPSFPLVERQANEVDWWDMVCNVKKLINEKKEDGKVFWQNLAGYKRQEALRPYLSSEEDRKKGKKFARYQLGDLLLHLEKKHGEDWGKVYDEAWERIDKKVEGLSKHIKLEEERRSEDAQSKAALTDWLRAKASFVIEGLKEADKDEFCRCELKLQKWYGDLRGKPFAIEAENSILDISGFSKQYNCAFIWQKDGVKKLNLYLIINYFKGGKLRFKKIKPEAFEANRFYTVINKKSGEIVPMEVNFNFDDPNLIILPLAFGKRQGREFIWNDLLSLETGSLKLANGRVIEKTLYNRRTRQDEPALFVALTFERREVLDSSNIKPMNLIGVDRGENIPAVIALTDPEGCPLSRFKDSLGNPTHILRIGESYKEKQRTIQAKKEVEQRRAGGYSRKYASKAKNLADDMVRNTARDLLYYAVTQDAMLIFENLSRGFGRQGKRTFMAERQYTRMEDWLTAKLAYEGLPSKTYLSKTLAQYTSKTCSNCGFTITSADYDRVLEKLKKTATGWMTTINGKELKVEGQITYYNRYKRQNVVKDLSVELDRLSEESVNNDISSWTKGRSGEALSLLKKRFSHRPVQEKFVCLNCGFETHADEQAALNIARSWLFLRSQEYKKYQTNKTTGNTDKRAFVETWQSFYRKKLKEVWKPAV

SEQ ID NO: 26967 - protein, 978 aa, Artificial Sequence
  CasX Variant
QEIKRINKIRRRLVKDSNTKKAGKTGPMKTLLVRVMTPDLRERLENLRKKPENIPQPISNTSRANLNKLLTDYTEMKKAILHVYWEEFQKDPVGLMSRVAQPASKKIDQNKLKPEMDEKGNLTTAGFACSQCGQPLFVYKLEQVSEKGKAYTNYFGRCNVAEHEKLILLAQLKPEKDSDEAVTYSLGKFGQRALDFYSIHVTKESTHPVKPLAQIAGNRYASGPVGKALSDACMGTIASFLSKYQDIIIEHQKVVKGNQKRLESLRELAGKENLEYPSVTLPPQPHTKEGVDAYNEVIARVRTWVNLNLWQKLKLSRDDAKPLLRLKGFPSFPLVERQANEVDWWDMVCNVKKLINEKKEDGKVFWQNLAGYKRQEALRPYLSSEEDRKKGKKFARYQLGDLLLHLEKKHGEDWGKVYDEAWERIDKKVEGLSKHIKLEEERRSEDAQSKAALTDWLRAKASFVIEGLKEADKDEFCRCELKLQKWYGDLRGKPFAIEAENSILDISGFSKQYNCAFIWQKDGVKKLNLYLIINYFKGGKLRFKKIKPEAFEANRFYTVINKKSGEIVPMEVNFNFDDPNLIILPLAFGKRQGREFIWNDLLSLETGSLKLANGRVIEKTLYNRRTRQDEPALFVALTFERREVLDSSNIKPMNLIGVDRGENIPAVIALTDPEGCPLSRFKDSLGNPTHILRIGESYKEKQRTIQAKKEVEQRRAGGYSRKYASKAKNLADDMVRNTARDLLYYAVTQDAMLIFENLSRGFGRQGKRTFMAERQYTRMEDWLTAKLAYEGLPSKTYLSKTLAQYTSKTCSNCGFTITSADYDRVLEKLKKTATGWMTTINGKELKVEGQITYYNRYKRQNVVKDLSVELDRLSEESVNNDISSWTKGRSGEALSLLKKRFSHRPVQEKFVCLNCGFETHADEQAALNIARSWLFLRSQEYKKYQTNKTTGNTDKRAFVETWQSFYRKKLKEVWKPAV

SEQ ID NO: 26968 - protein, 978 aa, Artificial Sequence
  CasX Variant
QEIKRINKIRRRLVKDSNTKKAGKTGPMKTLLVRVMTPDLRERLENLRKKPENIPQPISNTSRANLNKLLTDYTEMKKAILHVYWEEFQKDPVGLMSRVAQPASKKIDQNKLKPEMDEKGNLTTAGFACSQCGQPLFVYKLEQVSEKGKAYTNYFGRCNVAEHEKLILLAQLKPEKDSDEAVTYSLGKFGQRALDFYSIHVTKESTHPVKPLAQIAGNRYASGPVGKALSDACMGTIASFLSKYQDIIIEHQKVVKGNQKRLESLRELAGKENLEYPSVTLPPQPHTKEGVDAYNEVIARVRWWVNLNLWQKLKLSRDDAKPLLRLKGFPSFPLVERQANEVDWWDMVCNVKKLINEKKEDGKVFWQNLAGYKRQEALRPYLSSEEDRKKGKKFARYQLGDLLLHLEKKHGEDWGKVYDEAWERIDKKVEGLSKHIKLEEERRSEDAQSKAALTDWLRAKASFVIEGLKEADKDEFCRCELKLQKWYGDLRGKPFAIEAENSILDISGFSKQYNCAFIWQKDGVKKLNLYLIINYFKGGKLRFKKIKPEAFEANRFYTVINKKSGEIVPMEVNFNFDDPNLIILPLAFGKRQGREFIWNDLLSLETGSLKLANGRVIEKTLYNRRTRQDEPALFVALTFERREVLDSSNIKPMNLIGVDRGENIPAVIALTDPEGCPLSRFKDSLGNPTHILRIGESYKEKQRTIQAKKEVEQRRAGGYSRKYASKAKNLADDMVRNTARDLLYYAVTQDAMLIFENLSRGFGRQGKRTFMAERQYTRMEDWLTAKLAYEGLPSKTYLSKTLAQYTSKTCSNCGFTITSADYDRVLEKLKKTATGWMTTINGKELKVEGQITYYNRYKRQNVVKDLSVELDRLSEESVNNDISSWTKGRSGEALSLLKKRFSHRPVQEKFVCLNCGFETHADEQAALNIARSWLFLRSQEYKKYQTNKTTGNTDKRAFVETWQSFYRKKLKEVWKPAV

SEQ ID NO: 26969 - protein, 978 aa, Artificial Sequence
  CasX Variant
QEIKRINKIRRRLVKDSNTKKAGKTGPMKTLLVRVMTPDLRERLENLRKKPENIPQPISNTSRANLNKLLTDYTEMKKAILHVYWEEFQKDPVGLMSRVAQPASKKIDQNKLKPEMDEKGNLTTAGFACSQCGQPLFVYKLEQVSEKGKAYTNYFGRCNVAEHEKLILLAQLKPEKDSDEAVTYSLGKFGQRALDFYSIHVTKESTHPVKPLAQIAGNRYASGPVGKALSDACMGTIASFLSKYQDIIIEHQKVVKGNQKRLESLRELAGKENLEYPSVTLPPQPHTKEGVDAYNEVIARVRMWVNLNLWQKLKLSRDDAKPLLRLKNFPSFPLVERQANEVDWWDMVCNVKKLINEKKEDGKVFWQNLAGYKRQEALRPYLSSEEDRKKGKKFARYQLGDLLLHLEKKHGEDWGKVYDEAWERIDKKVEGLSKHIKLEEERRSEDAQSKAALTDWLRAKASFVIEGLKEADKDEFCRCELKLQKWYGDLRGKPFAIEAENSILDISGFSKQYNCAFIWQKDGVKKLNLYLIINYFKGGKLRFKKIKPEAFEANRFYTVINKKSGEIVPMEVNFNFDDPNLIILPLAFGKRQGREFIWNDLLSLETGSLKLANGRVIEKTLYNRRTRQDEPALFVALTFERREVLDSSNIKPMNLIGVDRGENIPAVIALTDPEGCPLSRFKDSLGNPTHILRIGESYKEKQRTIQAKKEVEQRRAGGYSRKYASKAKNLADDMVRNTARDLLYYAVTQDAMLIFENLSRGFGRQGKRTFMAERQYTRMEDWLTAKLAYEGLPSKTYLSKTLAQYTSKTCSNCGFTITSADYDRVLEKLKKTATGWMTTINGKELKVEGQITYYNRYKRQNVVKDLSVELDRLSEESVNNDISSWTKGRSGEALSLLKKRFSHRPVQEKFVCLNCGFETHADEQAALNIARSWLFLRSQEYKKYQTNKTTGNTDKRAFVETWQSFYRKKLKEVWKPAV

SEQ ID NO: 26970 - protein, 978 aa, Artificial Sequence
  CasX Variant
QEIKRINKIRRRLVKDSNTKKAGKTGPMKTLLVRVMTPDLRERLENLRKKPENIPQPISNTSRANLNKLLTDYTEMKKAILHVYWEEFQKDPVGLMSRVAQPASKKIDQNKLKPEMDEKGNLTTAGFACSQCGQPLFVYKLEQVSEKGKAYTNYFGRCNVAEHEKLILLAQLKPEKDSDEAVTYSLGKFGQRALDFYSIHVTKESTHPVKPLAQIAGNRYASGPVGKALSDACMGTIASFLSKYQDIIIEHQKVVKGNQKRLESLRELAGKENLEYPSVTLPPQPHTKEGVDAYNEVIARVRMWVNLNLWQKLKLSRDDAKPLLRLKGFPQFPLVERQANEVDWWDMVCNVKKLINEKKEDGKVFWQNLAGYKRQEALRPYLSSEEDRKKGKKFARYQLGDLLLHLEKKHGEDWGKVYDEAWERIDKKVEGLSKHIKLEEERRSEDAQSKAALTDWLRAKASFVIEGLKEADKDEFCRCELKLQKWYGDLRGKPFAIEAENSILDISGFSKQYNCAFIWQKDGVKKLNLYLIINYFKGGKLRFKKIKPEAFEANRFYTVINKKSGEIVPMEVNFNFDDPNLIILPLAFGKRQGREFIWNDLLSLETGSLKLANGRVIEKTLYNRRTRQDEPALFVALTFERREVLDSSNIKPMNLIGVDRGENIPAVIALTDPEGCPLSRFKDSLGNPTHILRIGESYKEKQRTIQAKKEVEQRRAGGYSRKYASKAKNLADDMVRNTARDLLYYAVTQDAMLIFENLSRGFGRQGKRTFMAERQYTRMEDWLTAKLAYEGLPSKTYLSKTLAQYTSKTCSNCGFTITSADYDRVLEKLKKTATGWMTTINGKELKVEGQITYYNRYKRQNVVKDLSVELDRLSEESVNNDISSWTKGRSGEALSLLKKRFSHRPVQEKFVCLNCGFETHADEQAALNIARSWLFLRSQEYKKYQTNKTTGNTDKRAFVETWQSFYRKKLKEVWKPAV

SEQ ID NO: 26971 - protein, 979 aa, Artificial Sequence
  CasX Variant
QEIKRINKIRRRLVKDSNTKKAGKTGPMKTLLVRVMTPDLRERLENLRKKPENIPQPISNTSRANLNKLLTDYTEMKKAILHVYWEEFQKDPVGLMSRVAQPASKKIDQNKLKPEMDEKGNLTTAGFACSQCGQPLFVYKLEQVSEKGKAYTNYFGRCNVAEHEKLILLAQLKPEKDSDEAVTYSLGKFGQRALDFYSIHVTKESTHPVKPLAQIAGNRYASGPVGKALSDACMGTIASFLSKYQDIIIEHQKVVKGNQKRLESLRELAGKENLEYPSVTLPPQPHTKEGVDAYNEVIARVRMWVNLNLWQKLKLSRDDAKPLLRLKGFPSFPALVERQANEVDWWDMVCNVKKLINEKKEDGKVFWQNLAGYKRQEALRPYLSSEEDRKKGKKFARYQLGDLLLHLEKKHGEDWGKVYDEAWERIDKKVEGLSKHIKLEEERRSEDAQSKAALTDWLRAKASFVIEGLKEADKDEFCRCELKLQKWYGDLRGKPFAIEAENSILDISGFSKQYNCAFIWQKDGVKKLNLYLIINYFKGGKLRFKKIKPEAFEANRFYTVINKKSGEIVPMEVNFNFDDPNLIILPLAFGKRQGREFIWNDLLSLETGSLKLANGRVIEKTLYNRRTRQDEPALFVALTFERREVLDSSNIKPMNLIGVDRGENIPAVIALTDPEGCPLSRFKDSLGNPTHILRIGESYKEKQRTIQAKKEVEQRRAGGYSRKYASKAKNLADDMVRNTARDLLYYAVTQDAMLIFENLSRGFGRQGKRTFMAERQYTRMEDWLTAKLAYEGLPSKTYLSKTLAQYTSKTCSNCGFTITSADYDRVLEKLKKTATGWMTTINGKELKVEGQITYYNRYKRQNVVKDLSVELDRLSEESVNNDISSWTKGRSGEALSLLKKRFSHRPVQEKFVCLNCGFETHADEQAALNIARSWLFLRSQEYKKYQTNKTTGNTDKRAFVETWQSFYRKKLKEVWKPAV

SEQ ID NO: 26972 - protein, 977 aa, Artificial Sequence
  CasX Variant
QEIKRINKIRRRLVKDSNTKKAGKTGPMKTLLVRVMTPDLRERLENLRKKPENIPQPISNTSRANLNKLLTDYTEMKKAILHVYWEEFQKDPVGLMSRVAQPASKKIDQNKLKPEMDEKGNLTTAGFACSQCGQPLFVYKLEQVSEKGKAYTNYFGRCNVAEHEKLILLAQLKPEKDSDEAVTYSLGKFGQRALDFYSIHVTKESTHPVKPLAQIAGNRYASGPVGKALSDACMGTIASFLSKYQDIIIEHQKVVKGNQKRLESLRELAGKENLEYPSVTLPPQPHTKEGVDAYNEVIARVRMWVNLNLWQKLKLSRDDAKPLLRLKGFPSFPLERQANEVDWWDMVCNVKKLINEKKEDGKVFWQNLAGYKRQEALRPYLSSEEDRKKGKKFARYQLGDLLLHLEKKHGEDWGKVYDEAWERIDKKVEGLSKHIKLEEERRSEDAQSKAALTDWLRAKASFVIEGLKEADKDEFCRCELKLQKWYGDLRGKPFAIEAENSILDISGFSKQYNCAFIWQKDGVKKLNLYLIINYFKGGKLRFKKIKPEAFEANRFYTVINKKSGEIVPMEVNFNFDDPNLIILPLAFGKRQGREFIWNDLLSLETGSLKLANGRVIEKTLYNRRTRQDEPALFVALTFERREVLDSSNIKPMNLIGVDRGENIPAVIALTDPEGCPLSRFKDSLGNPTHILRIGESYKEKQRTIQAKKEVEQRRAGGYSRKYASKAKNLADDMVRNTARDLLYYAVTQDAMLIFENLSRGFGRQGKRTFMAERQYTRMEDWLTAKLAYEGLPSKTYLSKTLAQYTSKTCSNCGFTITSADYDRVLEKLKKTATGWMTTINGKELKVEGQITYYNRYKRQNVVKDLSVELDRLSEESVNNDISSWTKGRSGEALSLLKKRFSHRPVQEKFVCLNCGFETHADEQAALNIARSWLFLRSQEYKKYQTNKTTGNTDKRAFVETWQSFYRKKLKEVWKPAV

SEQ ID NO: 26973 - protein, 978 aa, Artificial Sequence
  CasX Variant
QEIKRINKIRRRLVKDSNTKKAGKTGPMKTLLVRVMTPDLRERLENLRKKPENIPQPISNTSRANLNKLLTDYTEMKKAILHVYWEEFQKDPVGLMSRVAQPASKKIDQNKLKPEMDEKGNLTTAGFACSQCGQPLFVYKLEQVSEKGKAYTNYFGRCNVAEHEKLILLAQLKPEKDSDEAVTYSLGKFGQRALDFYSIHVTKESTHPVKPLAQIAGNRYASGPVGKALSDACMGTIASFLSKYQDIIIEHQKVVKGNQKRLESLRELAGKENLEYPSVTLPPQPHTKEGVDAYNEVIARVRMWVNLNLWQKLKLSRDDAKPLLRLKGFPSFPLVPRQANEVDWWDMVCNVKKLINEKKEDGKVFWQNLAGYKRQEALRPYLSSEEDRKKGKKFARYQLGDLLLHLEKKHGEDWGKVYDEAWERIDKKVEGLSKHIKLEEERRSEDAQSKAALTDWLRAKASFVIEGLKEADKDEFCRCELKLQKWYGDLRGKPFAIEAENSILDISGFSKQYNCAFIWQKDGVKKLNLYLIINYFKGGKLRFKKIKPEAFEANRFYTVINKKSGEIVPMEVNFNFDDPNLIILPLAFGKRQGREFIWNDLLSLETGSLKLANGRVIEKTLYNRRTRQDEPALFVALTFERREVLDSSNIKPMNLIGVDRGENIPAVIALTDPEGCPLSRFKDSLGNPTHILRIGESYKEKQRTIQAKKEVEQRRAGGYSRKYASKAKNLADDMVRNTARDLLYYAVTQDAMLIFENLSRGFGRQGKRTFMAERQYTRMEDWLTAKLAYEGLPSKTYLSKTLAQYTSKTCSNCGFTITSADYDRVLEKLKKTATGWMTTINGKELKVEGQITYYNRYKRQNVVKDLSVELDRLSEESVNNDISSWTKGRSGEALSLLKKRFSHRPVQEKFVCLNCGFETHADEQAALNIARSWLFLRSQEYKKYQTNKTTGNTDKRAFVETWQSFYRKKLKEVWKPAV

SEQ ID NO: 26974 - protein, 977 aa, Artificial Sequence
  CasX Variant
QEIKRINKIRRRLVKDSNTKKAGKTGPMKTLLVRVMTPDLRERLENLRKKPENIPQPISNTSRANLNKLLTDYTEMKKAILHVYWEEFQKDPVGLMSRVAQPASKKIDQNKLKPEMDEKGNLTTAGFACSQCGQPLFVYKLEQVSEKGKAYTNYFGRCNVAEHEKLILLAQLKPEKDSDEAVTYSLGKFGQRALDFYSIHVTKESTHPVKPLAQIAGNRYASGPVGKALSDACMGTIASFLSKYQDIIIEHQKVVKGNQKRLESLRELAGKENLEYPSVTLPPQPHTKEGVDAYNEVIARVRMWVNLNLWQKLKLSRDDAKPLLRLKGFPSFPLVRQANEVDWWDMVCNVKKLINEKKEDGKVFWQNLAGYKRQEALRPYLSSEEDRKKGKKFARYQLGDLLLHLEKKHGEDWGKVYDEAWERIDKKVEGLSKHIKLEEERRSEDAQSKAALTDWLRAKASFVIEGLKEADKDEFCRCELKLQKWYGDLRGKPFAIEAENSILDISGFSKQYNCAFIWQKDGVKKLNLYLIINYFKGGKLRFKKIKPEAFEANRFYTVINKKSGEIVPMEVNFNFDDPNLIILPLAFGKRQGREFIWNDLLSLETGSLKLANGRVIEKTLYNRRTRQDEPALFVALTFERREVLDSSNIKPMNLIGVDRGENIPAVIALTDPEGCPLSRFKDSLGNPTHILRIGESYKEKQRTIQAKKEVEQRRAGGYSRKYASKAKNLADDMVRNTARDLLYYAVTQDAMLIFENLSRGFGRQGKRTFMAERQYTRMEDWLTAKLAYEGLPSKTYLSKTLAQYTSKTCSNCGFTITSADYDRVLEKLKKTATGWMTTINGKELKVEGQITYYNRYKRQNVVKDLSVELDRLSEESVNNDISSWTKGRSGEALSLLKKRFSHRPVQEKFVCLNCGFETHADEQAALNIARSWLFLRSQEYKKYQTNKTTGNTDKRAFVETWQSFYRKKLKEVWKPAV

SEQ ID NO: 26975 - protein, 978 aa, Artificial Sequence
  CasX Variant
QEIKRINKIRRRLVKDSNTKKAGKTGPMKTLLVRVMTPDLRERLENLRKKPENIPQPISNTSRANLNKLLTDYTEMKKAILHVYWEEFQKDPVGLMSRVAQPASKKIDQNKLKPEMDEKGNLTTAGFACSQCGQPLFVYKLEQVSEKGKAYTNYFGRCNVAEHEKLILLAQLKPEKDSDEAVTYSLGKFGQRALDFYSIHVTKESTHPVKPLAQIAGNRYASGPVGKALSDACMGTIASFLSKYQDIIIEHQKVVKGNQKRLESLRELAGKENLEYPSVTLPPQPHTKEGVDAYNEVIARVRMWVNLNLWQKLKLSRDDAKPLLRLKGFPSFPLVLRQANEVDWWDMVCNVKKLINEKKEDGKVFWQNLAGYKRQEALRPYLSSEEDRKKGKKFARYQLGDLLLHLEKKHGEDWGKVYDEAWERIDKKVEGLSKHIKLEEERRSEDAQSKAALTDWLRAKASFVIEGLKEADKDEFCRCELKLQKWYGDLRGKPFAIEAENSILDISGFSKQYNCAFIWQKDGVKKLNLYLIINYFKGGKLRFKKIKPEAFEANRFYTVINKKSGEIVPMEVNFNFDDPNLIILPLAFGKRQGREFIWNDLLSLETGSLKLANGRVIEKTLYNRRTRQDEPALFVALTFERREVLDSSNIKPMNLIGVDRGENIPAVIALTDPEGCPLSRFKDSLGNPTHILRIGESYKEKQRTIQAKKEVEQRRAGGYSRKYASKAKNLADDMVRNTARDLLYYAVTQDAMLIFENLSRGFGRQGKRTFMAERQYTRMEDWLTAKLAYEGLPSKTYLSKTLAQYTSKTCSNCGFTITSADYDRVLEKLKKTATGWMTTINGKELKVEGQITYYNRYKRQNVVKDLSVELDRLSEESVNNDISSWTKGRSGEALSLLKKRFSHRPVQEKFVCLNCGFETHADEQAALNIARSWLFLRSQEYKKYQTNKTTGNTDKRAFVETWQSFYRKKLKEVWKPAV

SEQ ID NO: 26976 - protein, 978 aa, Artificial Sequence
  CasX Variant
QEIKRINKIRRRLVKDSNTKKAGKTGPMKTLLVRVMTPDLRERLENLRKKPENIPQPISNTSRANLNKLLTDYTEMKKAILHVYWEEFQKDPVGLMSRVAQPASKKIDQNKLKPEMDEKGNLTTAGFACSQCGQPLFVYKLEQVSEKGKAYTNYFGRCNVAEHEKLILLAQLKPEKDSDEAVTYSLGKFGQRALDFYSIHVTKESTHPVKPLAQIAGNRYASGPVGKALSDACMGTIASFLSKYQDIIIEHQKVVKGNQKRLESLRELAGKENLEYPSVTLPPQPHTKEGVDAYNEVIARVRMWVNLNLWQKLKLSRDDAKPLLRLKGFPSFPLVRRQANEVDWWDMVCNVKKLINEKKEDGKVFWQNLAGYKRQEALRPYLSSEEDRKKGKKFARYQLGDLLLHLEKKHGEDWGKVYDEAWERIDKKVEGLSKHIKLEEERRSEDAQSKAALTDWLRAKASFVIEGLKEADKDEFCRCELKLQKWYGDLRGKPFAIEAENSILDISGFSKQYNCAFIWQKDGVKKLNLYLIINYFKGGKLRFKKIKPEAFEANRFYTVINKKSGEIVPMEVNFNFDDPNLIILPLAFGKRQGREFIWNDLLSLETGSLKLANGRVIEKTLYNRRTRQDEPALFVALTFERREVLDSSNIKPMNLIGVDRGENIPAVIALTDPEGCPLSRFKDSLGNPTHILRIGESYKEKQRTIQAKKEVEQRRAGGYSRKYASKAKNLADDMVRNTARDLLYYAVTQDAMLIFENLSRGFGRQGKRTFMAERQYTRMEDWLTAKLAYEGLPSKTYLSKTLAQYTSKTCSNCGFTITSADYDRVLEKLKKTATGWMTTINGKELKVEGQITYYNRYKRQNVVKDLSVELDRLSEESVNNDISSWTKGRSGEALSLLKKRFSHRPVQEKFVCLNCGFETHADEQAALNIARSWLFLRSQEYKKYQTNKTTGNTDKRAFVETWQSFYRKKLKEVWKPAV

SEQ ID NO: 26977 - protein, 979 aa, Artificial Sequence
  CasX Variant
QEIKRINKIRRRLVKDSNTKKAGKTGPMKTLLVRVMTPDLRERLENLRKKPENIPQPISNTSRANLNKLLTDYTEMKKAILHVYWEEFQKDPVGLMSRVAQPASKKIDQNKLKPEMDEKGNLTTAGFACSQCGQPLFVYKLEQVSEKGKAYTNYFGRCNVAEHEKLILLAQLKPEKDSDEAVTYSLGKFGQRALDFYSIHVTKESTHPVKPLAQIAGNRYASGPVGKALSDACMGTIASFLSKYQDIIIEHQKVVKGNQKRLESLRELAGKENLEYPSVTLPPQPHTKEGVDAYNEVIARVRMWVNLNLWQKLKLSRDDAKPLLRLKGFPSFPLVERQQANEVDWWDMVCNVKKLINEKKEDGKVFWQNLAGYKRQEALRPYLSSEEDRKKGKKFARYQLGDLLLHLEKKHGEDWGKVYDEAWERIDKKVEGLSKHIKLEEERRSEDAQSKAALTDWLRAKASFVIEGLKEADKDEFCRCELKLQKWYGDLRGKPFAIEAENSILDISGFSKQYNCAFIWQKDGVKKLNLYLIINYFKGGKLRFKKIKPEAFEANRFYTVINKKSGEIVPMEVNFNFDDPNLIILPLAFGKRQGREFIWNDLLSLETGSLKLANGRVIEKTLYNRRTRQDEPALFVALTFERREVLDSSNIKPMNLIGVDRGENIPAVIALTDPEGCPLSRFKDSLGNPTHILRIGESYKEKQRTIQAKKEVEQRRAGGYSRKYASKAKNLADDMVRNTARDLLYYAVTQDAMLIFENLSRGFGRQGKRTFMAERQYTRMEDWLTAKLAYEGLPSKTYLSKTLAQYTSKTCSNCGFTITSADYDRVLEKLKKTATGWMTTINGKELKVEGQITYYNRYKRQNVVKDLSVELDRLSEESVNNDISSWTKGRSGEALSLLKKRFSHRPVQEKFVCLNCGFETHADEQAALNIARSWLFLRSQEYKKYQTNKTTGNTDKRAFVETWQSFYRKKLKEVWKPAV

SEQ ID NO: 26978 - protein, 979 aa, Artificial Sequence
  CasX Variant
QEIKRINKIRRRLVKDSNTKKAGKTGPMKTLLVRVMTPDLRERLENLRKKPENIPQPISNTSRANLNKLLTDYTEMKKAILHVYWEEFQKDPVGLMSRVAQPASKKIDQNKLKPEMDEKGNLTTAGFACSQCGQPLFVYKLEQVSEKGKAYTNYFGRCNVAEHEKLILLAQLKPEKDSDEAVTYSLGKFGQRALDFYSIHVTKESTHPVKPLAQIAGNRYASGPVGKALSDACMGTIASFLSKYQDIIIEHQKVVKGNQKRLESLRELAGKENLEYPSVTLPPQPHTKEGVDAYNEVIARVRMWVNLNLWQKLKLSRDDAKPLLRLKGFPSFPLVERQANHEVDWWDMVCNVKKLINEKKEDGKVFWQNLAGYKRQEALRPYLSSEEDRKKGKKFARYQLGDLLLHLEKKHGEDWGKVYDEAWERIDKKVEGLSKHIKLEEERRSEDAQSKAALTDWLRAKASFVIEGLKEADKDEFCRCELKLQKWYGDLRGKPFAIEAENSILDISGFSKQYNCAFIWQKDGVKKLNLYLIINYFKGGKLRFKKIKPEAFEANRFYTVINKKSGEIVPMEVNFNFDDPNLIILPLAFGKRQGREFIWNDLLSLETGSLKLANGRVIEKTLYNRRTRQDEPALFVALTFERREVLDSSNIKPMNLIGVDRGENIPAVIALTDPEGCPLSRFKDSLGNPTHILRIGESYKEKQRTIQAKKEVEQRRAGGYSRKYASKAKNLADDMVRNTARDLLYYAVTQDAMLIFENLSRGFGRQGKRTFMAERQYTRMEDWLTAKLAYEGLPSKTYLSKTLAQYTSKTCSNCGFTITSADYDRVLEKLKKTATGWMTTINGKELKVEGQITYYNRYKRQNVVKDLSVELDRLSEESVNNDISSWTKGRSGEALSLLKKRFSHRPVQEKFVCLNCGFETHADEQAALNIARSWLFLRSQEYKKYQTNKTTGNTDKRAFVETWQSFYRKKLKEVWKPAV

SEQ ID NO: 26979 - protein, 979 aa, Artificial Sequence
  CasX Variant
QEIKRINKIRRRLVKDSNTKKAGKTGPMKTLLVRVMTPDLRERLENLRKKPENIPQPISNTSRANLNKLLTDYTEMKKAILHVYWEEFQKDPVGLMSRVAQPASKKIDQNKLKPEMDEKGNLTTAGFACSQCGQPLFVYKLEQVSEKGKAYTNYFGRCNVAEHEKLILLAQLKPEKDSDEAVTYSLGKFGQRALDFYSIHVTKESTHPVKPLAQIAGNRYASGPVGKALSDACMGTIASFLSKYQDIIIEHQKVVKGNQKRLESLRELAGKENLEYPSVTLPPQPHTKEGVDAYNEVIARVRMWVNLNLWQKLKLSRDDAKPLLRLKGFPSFPLVERQANAEVDWWDMVCNVKKLINEKKEDGKVFWQNLAGYKRQEALRPYLSSEEDRKKGKKFARYQLGDLLLHLEKKHGEDWGKVYDEAWERIDKKVEGLSKHIKLEEERRSEDAQSKAALTDWLRAKASFVIEGLKEADKDEFCRCELKLQKWYGDLRGKPFAIEAENSILDISGFSKQYNCAFIWQKDGVKKLNLYLIINYFKGGKLRFKKIKPEAFEANRFYTVINKKSGEIVPMEVNFNFDDPNLIILPLAFGKRQGREFIWNDLLSLETGSLKLANGRVIEKTLYNRRTRQDEPALFVALTFERREVLDSSNIKPMNLIGVDRGENIPAVIALTDPEGCPLSRFKDSLGNPTHILRIGESYKEKQRTIQAKKEVEQRRAGGYSRKYASKAKNLADDMVRNTARDLLYYAVTQDAMLIFENLSRGFGRQGKRTFMAERQYTRMEDWLTAKLAYEGLPSKTYLSKTLAQYTSKTCSNCGFTITSADYDRVLEKLKKTATGWMTTINGKELKVEGQITYYNRYKRQNVVKDLSVELDRLSEESVNNDISSWTKGRSGEALSLLKKRFSHRPVQEKFVCLNCGFETHADEQAALNIARSWLFLRSQEYKKYQTNKTTGNTDKRAFVETWQSFYRKKLKEVWKPAV

SEQ ID NO: 26980 - protein, 979 aa, Artificial Sequence
  CasX Variant
QEIKRINKIRRRLVKDSNTKKAGKTGPMKTLLVRVMTPDLRERLENLRKKPENIPQPISNTSRANLNKLLTDYTEMKKAILHVYWEEFQKDPVGLMSRVAQPASKKIDQNKLKPEMDEKGNLTTAGFACSQCGQPLFVYKLEQVSEKGKAYTNYFGRCNVAEHEKLILLAQLKPEKDSDEAVTYSLGKFGQRALDFYSIHVTKESTHPVKPLAQIAGNRYASGPVGKALSDACMGTIASFLSKYQDIIIEHQKVVKGNQKRLESLRELAGKENLEYPSVTLPPQPHTKEGVDAYNEVIARVRMWVNLNLWQKLKLSRDDAKPLLRLKGFPSFPLVERQANEVDDWWDMVCNVKKLINEKKEDGKVFWQNLAGYKRQEALRPYLSSEEDRKKGKKFARYQLGDLLLHLEKKHGEDWGKVYDEAWERIDKKVEGLSKHIKLEEERRSEDAQSKAALTDWLRAKASFVIEGLKEADKDEFCRCELKLQKWYGDLRGKPFAIEAENSILDISGFSKQYNCAFIWQKDGVKKLNLYLIINYFKGGKLRFKKIKPEAFEANRFYTVINKKSGEIVPMEVNFNFDDPNLIILPLAFGKRQGREFIWNDLLSLETGSLKLANGRVIEKTLYNRRTRQDEPALFVALTFERREVLDSSNIKPMNLIGVDRGENIPAVIALTDPEGCPLSRFKDSLGNPTHILRIGESYKEKQRTIQAKKEVEQRRAGGYSRKYASKAKNLADDMVRNTARDLLYYAVTQDAMLIFENLSRGFGRQGKRTFMAERQYTRMEDWLTAKLAYEGLPSKTYLSKTLAQYTSKTCSNCGFTITSADYDRVLEKLKKTATGWMTTINGKELKVEGQITYYNRYKRQNVVKDLSVELDRLSEESVNNDISSWTKGRSGEALSLLKKRFSHRPVQEKFVCLNCGFETHADEQAALNIARSWLFLRSQEYKKYQTNKTTGNTDKRAFVETWQSFYRKKLKEVWKPAV

SEQ ID NO: 26981 - protein, 979 aa, Artificial Sequence
  CasX Variant
QEIKRINKIRRRLVKDSNTKKAGKTGPMKTLLVRVMTPDLRERLENLRKKPENIPQPISNTSRANLNKLLTDYTEMKKAILHVYWEEFQKDPVGLMSRVAQPASKKIDQNKLKPEMDEKGNLTTAGFACSQCGQPLFVYKLEQVSEKGKAYTNYFGRCNVAEHEKLILLAQLKPEKDSDEAVTYSLGKFGQRALDFYSIHVTKESTHPVKPLAQIAGNRYASGPVGKALSDACMGTIASFLSKYQDIIIEHQKVVKGNQKRLESLRELAGKENLEYPSVTLPPQPHTKEGVDAYNEVIARVRMWVNLNLWQKLKLSRDDAKPLLRLKGFPSFPLVERQANEVDWWPDMVCNVKKLINEKKEDGKVFWQNLAGYKRQEALRPYLSSEEDRKKGKKFARYQLGDLLLHLEKKHGEDWGKVYDEAWERIDKKVEGLSKHIKLEEERRSEDAQSKAALTDWLRAKASFVIEGLKEADKDEFCRCELKLQKWYGDLRGKPFAIEAENSILDISGFSKQYNCAFIWQKDGVKKLNLYLIINYFKGGKLRFKKIKPEAFEANRFYTVINKKSGEIVPMEVNFNFDDPNLIILPLAFGKRQGREFIWNDLLSLETGSLKLANGRVIEKTLYNRRTRQDEPALFVALTFERREVLDSSNIKPMNLIGVDRGENIPAVIALTDPEGCPLSRFKDSLGNPTHILRIGESYKEKQRTIQAKKEVEQRRAGGYSRKYASKAKNLADDMVRNTARDLLYYAVTQDAMLIFENLSRGFGRQGKRTFMAERQYTRMEDWLTAKLAYEGLPSKTYLSKTLAQYTSKTCSNCGFTITSADYDRVLEKLKKTATGWMTTINGKELKVEGQITYYNRYKRQNVVKDLSVELDRLSEESVNNDISSWTKGRSGEALSLLKKRFSHRPVQEKFVCLNCGFETHADEQAALNIARSWLFLRSQEYKKYQTNKTTGNTDKRAFVETWQSFYRKKLKEVWKPAV

SEQ ID NO: 26982 - protein, 978 aa, Artificial Sequence
  CasX Variant
QEIKRINKIRRRLVKDSNTKKAGKTGPMKTLLVRVMTPDLRERLENLRKKPENIPQPISNTSRANLNKLLTDYTEMKKAILHVYWEEFQKDPVGLMSRVAQPASKKIDQNKLKPEMDEKGNLTTAGFACSQCGQPLFVYKLEQVSEKGKAYTNYFGRCNVAEHEKLILLAQLKPEKDSDEAVTYSLGKFGQRALDFYSIHVTKESTHPVKPLAQIAGNRYASGPVGKALSDACMGTIASFLSKYQDIIIEHQKVVKGNQKRLESLRELAGKENLEYPSVTLPPQPHTKEGVDAYNEVIARVRMWVNLNLWQKLKLSRDDAKPLLRLKGFPSFPLVERQANEVDWWDMVCNVKKLINEKKEDGKVFWQNLAGYKRQEALRPYLSSEEDRKKGKKFARTQLGDLLLHLEKKHGEDWGKVYDEAWERIDKKVEGLSKHIKLEEERRSEDAQSKAALTDWLRAKASFVIEGLKEADKDEFCRCELKLQKWYGDLRGKPFAIEAENSILDISGFSKQYNCAFIWQKDGVKKLNLYLIINYFKGGKLRFKKIKPEAFEANRFYTVINKKSGEIVPMEVNFNFDDPNLIILPLAFGKRQGREFIWNDLLSLETGSLKLANGRVIEKTLYNRRTRQDEPALFVALTFERREVLDSSNIKPMNLIGVDRGENIPAVIALTDPEGCPLSRFKDSLGNPTHILRIGESYKEKQRTIQAKKEVEQRRAGGYSRKYASKAKNLADDMVRNTARDLLYYAVTQDAMLIFENLSRGFGRQGKRTFMAERQYTRMEDWLTAKLAYEGLPSKTYLSKTLAQYTSKTCSNCGFTITSADYDRVLEKLKKTATGWMTTINGKELKVEGQITYYNRYKRQNVVKDLSVELDRLSEESVNNDISSWTKGRSGEALSLLKKRFSHRPVQEKFVCLNCGFETHADEQAALNIARSWLFLRSQEYKKYQTNKTTGNTDKRAFVETWQSFYRKKLKEVWKPAV

SEQ ID NO: 26983 - protein, 978 aa, Artificial Sequence
  CasX Variant
QEIKRINKIRRRLVKDSNTKKAGKTGPMKTLLVRVMTPDLRERLENLRKKPENIPQPISNTSRANLNKLLTDYTEMKKAILHVYWEEFQKDPVGLMSRVAQPASKKIDQNKLKPEMDEKGNLTTAGFACSQCGQPLFVYKLEQVSEKGKAYTNYFGRCNVAEHEKLILLAQLKPEKDSDEAVTYSLGKFGQRALDFYSIHVTKESTHPVKPLAQIAGNRYASGPVGKALSDACMGTIASFLSKYQDIIIEHQKVVKGNQKRLESLRELAGKENLEYPSVTLPPQPHTKEGVDAYNEVIARVRMWVNLNLWQKLKLSRDDAKPLLRLKGFPSFPLVERQANEVDWWDMVCNVKKLINEKKEDGKVFWQNLAGYKRQEALRPYLSSEEDRKKGKKFARYQLMDLLLHLEKKHGEDWGKVYDEAWERIDKKVEGLSKHIKLEEERRSEDAQSKAALTDWLRAKASFVIEGLKEADKDEFCRCELKLQKWYGDLRGKPFAIEAENSILDISGFSKQYNCAFIWQKDGVKKLNLYLIINYFKGGKLRFKKIKPEAFEANRFYTVINKKSGEIVPMEVNFNFDDPNLIILPLAFGKRQGREFIWNDLLSLETGSLKLANGRVIEKTLYNRRTRQDEPALFVALTFERREVLDSSNIKPMNLIGVDRGENIPAVIALTDPEGCPLSRFKDSLGNPTHILRIGESYKEKQRTIQAKKEVEQRRAGGYSRKYASKAKNLADDMVRNTARDLLYYAVTQDAMLIFENLSRGFGRQGKRTFMAERQYTRMEDWLTAKLAYEGLPSKTYLSKTLAQYTSKTCSNCGFTITSADYDRVLEKLKKTATGWMTTINGKELKVEGQITYYNRYKRQNVVKDLSVELDRLSEESVNNDISSWTKGRSGEALSLLKKRFSHRPVQEKFVCLNCGFETHADEQAALNIARSWLFLRSQEYKKYQTNKTTGNTDKRAFVETWQSFYRKKLKEVWKPAV

SEQ ID NO: 26984 - protein, 978 aa, Artificial Sequence
  CasX Variant
QEIKRINKIRRRLVKDSNTKKAGKTGPMKTLLVRVMTPDLRERLENLRKKPENIPQPISNTSRANLNKLLTDYTEMKKAILHVYWEEFQKDPVGLMSRVAQPASKKIDQNKLKPEMDEKGNLTTAGFACSQCGQPLFVYKLEQVSEKGKAYTNYFGRCNVAEHEKLILLAQLKPEKDSDEAVTYSLGKFGQRALDFYSIHVTKESTHPVKPLAQIAGNRYASGPVGKALSDACMGTIASFLSKYQDIIIEHQKVVKGNQKRLESLRELAGKENLEYPSVTLPPQPHTKEGVDAYNEVIARVRMWVNLNLWQKLKLSRDDAKPLLRLKGFPSFPLVERQANEVDWWDMVCNVKKLINEKKEDGKVFWQNLAGYKRQEALRPYLSSEEDRKKGKKFARYQLGDLLNHLEKKHGEDWGKVYDEAWERIDKKVEGLSKHIKLEEERRSEDAQSKAALTDWLRAKASFVIEGLKEADKDEFCRCELKLQKWYGDLRGKPFAIEAENSILDISGFSKQYNCAFIWQKDGVKKLNLYLIINYFKGGKLRFKKIKPEAFEANRFYTVINKKSGEIVPMEVNFNFDDPNLIILPLAFGKRQGREFIWNDLLSLETGSLKLANGRVIEKTLYNRRTRQDEPALFVALTFERREVLDSSNIKPMNLIGVDRGENIPAVIALTDPEGCPLSRFKDSLGNPTHILRIGESYKEKQRTIQAKKEVEQRRAGGYSRKYASKAKNLADDMVRNTARDLLYYAVTQDAMLIFENLSRGFGRQGKRTFMAERQYTRMEDWLTAKLAYEGLPSKTYLSKTLAQYTSKTCSNCGFTITSADYDRVLEKLKKTATGWMTTINGKELKVEGQITYYNRYKRQNVVKDLSVELDRLSEESVNNDISSWTKGRSGEALSLLKKRFSHRPVQEKFVCLNCGFETHADEQAALNIARSWLFLRSQEYKKYQTNKTTGNTDKRAFVETWQSFYRKKLKEVWKPAV

SEQ ID NO: 26985 - protein, 978 aa, Artificial Sequence
  CasX Variant
QEIKRINKIRRRLVKDSNTKKAGKTGPMKTLLVRVMTPDLRERLENLRKKPENIPQPISNTSRANLNKLLTDYTEMKKAILHVYWEEFQKDPVGLMSRVAQPASKKIDQNKLKPEMDEKGNLTTAGFACSQCGQPLFVYKLEQVSEKGKAYTNYFGRCNVAEHEKLILLAQLKPEKDSDEAVTYSLGKFGQRALDFYSIHVTKESTHPVKPLAQIAGNRYASGPVGKALSDACMGTIASFLSKYQDIIIEHQKVVKGNQKRLESLRELAGKENLEYPSVTLPPQPHTKEGVDAYNEVIARVRMWVNLNLWQKLKLSRDDAKPLLRLKGFPSFPLVERQANEVDWWDMVCNVKKLINEKKEDGKVFWQNLAGYKRQEALRPYLSSEEDRKKGKKFARYQLGDLLWHLEKKHGEDWGKVYDEAWERIDKKVEGLSKHIKLEEERRSEDAQSKAALTDWLRAKASFVIEGLKEADKDEFCRCELKLQKWYGDLRGKPFAIEAENSILDISGFSKQYNCAFIWQKDGVKKLNLYLIINYFKGGKLRFKKIKPEAFEANRFYTVINKKSGEIVPMEVNFNFDDPNLIILPLAFGKRQGREFIWNDLLSLETGSLKLANGRVIEKTLYNRRTRQDEPALFVALTFERREVLDSSNIKPMNLIGVDRGENIPAVIALTDPEGCPLSRFKDSLGNPTHILRIGESYKEKQRTIQAKKEVEQRRAGGYSRKYASKAKNLADDMVRNTARDLLYYAVTQDAMLIFENLSRGFGRQGKRTFMAERQYTRMEDWLTAKLAYEGLPSKTYLSKTLAQYTSKTCSNCGFTITSADYDRVLEKLKKTATGWMTTINGKELKVEGQITYYNRYKRQNVVKDLSVELDRLSEESVNNDISSWTKGRSGEALSLLKKRFSHRPVQEKFVCLNCGFETHADEQAALNIARSWLFLRSQEYKKYQTNKTTGNTDKRAFVETWQSFYRKKLKEVWKPAV

SEQ ID NO: 26986 - protein, 978 aa, Artificial Sequence
  CasX Variant
QEIKRINKIRRRLVKDSNTKKAGKTGPMKTLLVRVMTPDLRERLENLRKKPENIPQPISNTSRANLNKLLTDYTEMKKAILHVYWEEFQKDPVGLMSRVAQPASKKIDQNKLKPEMDEKGNLTTAGFACSQCGQPLFVYKLEQVSEKGKAYTNYFGRCNVAEHEKLILLAQLKPEKDSDEAVTYSLGKFGQRALDFYSIHVTKESTHPVKPLAQIAGNRYASGPVGKALSDACMGTIASFLSKYQDIIIEHQKVVKGNQKRLESLRELAGKENLEYPSVTLPPQPHTKEGVDAYNEVIARVRMWVNLNLWQKLKLSRDDAKPLLRLKGFPSFPLVERQANEVDWWDMVCNVKKLINEKKEDGKVFWQNLAGYKRQEALRPYLSSEEDRKKGKKFARYQLGDLLLHLYKKHGEDWGKVYDEAWERIDKKVEGLSKHIKLEEERRSEDAQSKAALTDWLRAKASFVIEGLKEADKDEFCRCELKLQKWYGDLRGKPFAIEAENSILDISGFSKQYNCAFIWQKDGVKKLNLYLIINYFKGGKLRFKKIKPEAFEANRFYTVINKKSGEIVPMEVNFNFDDPNLIILPLAFGKRQGREFIWNDLLSLETGSLKLANGRVIEKTLYNRRTRQDEPALFVALTFERREVLDSSNIKPMNLIGVDRGENIPAVIALTDPEGCPLSRFKDSLGNPTHILRIGESYKEKQRTIQAKKEVEQRRAGGYSRKYASKAKNLADDMVRNTARDLLYYAVTQDAMLIFENLSRGFGRQGKRTFMAERQYTRMEDWLTAKLAYEGLPSKTYLSKTLAQYTSKTCSNCGFTITSADYDRVLEKLKKTATGWMTTINGKELKVEGQITYYNRYKRQNVVKDLSVELDRLSEESVNNDISSWTKGRSGEALSLLKKRFSHRPVQEKFVCLNCGFETHADEQAALNIARSWLFLRSQEYKKYQTNKTTGNTDKRAFVETWQSFYRKKLKEVWKPAV

SEQ ID NO: 26987 - protein, 978 aa, Artificial Sequence
  CasX Variant
QEIKRINKIRRRLVKDSNTKKAGKTGPMKTLLVRVMTPDLRERLENLRKKPENIPQPISNTSRANLNKLLTDYTEMKKAILHVYWEEFQKDPVGLMSRVAQPASKKIDQNKLKPEMDEKGNLTTAGFACSQCGQPLFVYKLEQVSEKGKAYTNYFGRCNVAEHEKLILLAQLKPEKDSDEAVTYSLGKFGQRALDFYSIHVTKESTHPVKPLAQIAGNRYASGPVGKALSDACMGTIASFLSKYQDIIIEHQKVVKGNQKRLESLRELAGKENLEYPSVTLPPQPHTKEGVDAYNEVIARVRMWVNLNLWQKLKLSRDDAKPLLRLKGFPSFPLVERQANEVDWWDMVCNVKKLINEKKEDGKVFWQNLAGYKRQEALRPYLSSEEDRKKGKKFARYQLGDLLLHLEKKHPEDWGKVYDEAWERIDKKVEGLSKHIKLEEERRSEDAQSKAALTDWLRAKASFVIEGLKEADKDEFCRCELKLQKWYGDLRGKPFAIEAENSILDISGFSKQYNCAFIWQKDGVKKLNLYLIINYFKGGKLRFKKIKPEAFEANRFYTVINKKSGEIVPMEVNFNFDDPNLIILPLAFGKRQGREFIWNDLLSLETGSLKLANGRVIEKTLYNRRTRQDEPALFVALTFERREVLDSSNIKPMNLIGVDRGENIPAVIALTDPEGCPLSRFKDSLGNPTHILRIGESYKEKQRTIQAKKEVEQRRAGGYSRKYASKAKNLADDMVRNTARDLLYYAVTQDAMLIFENLSRGFGRQGKRTFMAERQYTRMEDWLTAKLAYEGLPSKTYLSKTLAQYTSKTCSNCGFTITSADYDRVLEKLKKTATGWMTTINGKELKVEGQITYYNRYKRQNVVKDLSVELDRLSEESVNNDISSWTKGRSGEALSLLKKRFSHRPVQEKFVCLNCGFETHADEQAALNIARSWLFLRSQEYKKYQTNKTTGNTDKRAFVETWQSFYRKKLKEVWKPAV

SEQ ID NO: 26988 - protein, 979 aa, Artificial Sequence
  CasX Variant
QEIKRINKIRRRLVKDSNTKKAGKTGPMKTLLVRVMTPDLRERLENLRKKPENIPQPISNTSRANLNKLLTDYTEMKKAILHVYWEEFQKDPVGLMSRVAQPASKKIDQNKLKPEMDEKGNLTTAGFACSQCGQPLFVYKLEQVSEKGKAYTNYFGRCNVAEHEKLILLAQLKPEKDSDEAVTYSLGKFGQRALDFYSIHVTKESTHPVKPLAQIAGNRYASGPVGKALSDACMGTIASFLSKYQDIIIEHQKVVKGNQKRLESLRELAGKENLEYPSVTLPPQPHTKEGVDAYNEVIARVRMWVNLNLWQKLKLSRDDAKPLLRLKGFPSFPLVERQANEVDWWDMVCNVKKLINEKKEDGKVFWQNLAGYKRQEALRPYLSSEEDRKKGKKFARYQLGDLLLHLEKKHEGEDWGKVYDEAWERIDKKVEGLSKHIKLEEERRSEDAQSKAALTDWLRAKASFVIEGLKEADKDEFCRCELKLQKWYGDLRGKPFAIEAENSILDISGFSKQYNCAFIWQKDGVKKLNLYLIINYFKGGKLRFKKIKPEAFEANRFYTVINKKSGEIVPMEVNFNFDDPNLIILPLAFGKRQGREFIWNDLLSLETGSLKLANGRVIEKTLYNRRTRQDEPALFVALTFERREVLDSSNIKPMNLIGVDRGENIPAVIALTDPEGCPLSRFKDSLGNPTHILRIGESYKEKQRTIQAKKEVEQRRAGGYSRKYASKAKNLADDMVRNTARDLLYYAVTQDAMLIFENLSRGFGRQGKRTFMAERQYTRMEDWLTAKLAYEGLPSKTYLSKTLAQYTSKTCSNCGFTITSADYDRVLEKLKKTATGWMTTINGKELKVEGQITYYNRYKRQNVVKDLSVELDRLSEESVNNDISSWTKGRSGEALSLLKKRFSHRPVQEKFVCLNCGFETHADEQAALNIARSWLFLRSQEYKKYQTNKTTGNTDKRAFVETWQSFYRKKLKEVWKPAV

SEQ ID NO: 26989 - protein, 979 aa, Artificial Sequence
  CasX Variant
QEIKRINKIRRRLVKDSNTKKAGKTGPMKTLLVRVMTPDLRERLENLRKKPENIPQPISNTSRANLNKLLTDYTEMKKAILHVYWEEFQKDPVGLMSRVAQPASKKIDQNKLKPEMDEKGNLTTAGFACSQCGQPLFVYKLEQVSEKGKAYTNYFGRCNVAEHEKLILLAQLKPEKDSDEAVTYSLGKFGQRALDFYSIHVTKESTHPVKPLAQIAGNRYASGPVGKALSDACMGTIASFLSKYQDIIIEHQKVVKGNQKRLESLRELAGKENLEYPSVTLPPQPHTKEGVDAYNEVIARVRMWVNLNLWQKLKLSRDDAKPLLRLKGFPSFPLVERQANEVDWWDMVCNVKKLINEKKEDGKVFWQNLAGYKRQEALRPYLSSEEDRKKGKKFARYQLGDLLLHLEKKHGERDWGKVYDEAWERIDKKVEGLSKHIKLEEERRSEDAQSKAALTDWLRAKASFVIEGLKEADKDEFCRCELKLQKWYGDLRGKPFAIEAENSILDISGFSKQYNCAFIWQKDGVKKLNLYLIINYFKGGKLRFKKIKPEAFEANRFYTVINKKSGEIVPMEVNFNFDDPNLIILPLAFGKRQGREFIWNDLLSLETGSLKLANGRVIEKTLYNRRTRQDEPALFVALTFERREVLDSSNIKPMNLIGVDRGENIPAVIALTDPEGCPLSRFKDSLGNPTHILRIGESYKEKQRTIQAKKEVEQRRAGGYSRKYASKAKNLADDMVRNTARDLLYYAVTQDAMLIFENLSRGFGRQGKRTFMAERQYTRMEDWLTAKLAYEGLPSKTYLSKTLAQYTSKTCSNCGFTITSADYDRVLEKLKKTATGWMTTINGKELKVEGQITYYNRYKRQNVVKDLSVELDRLSEESVNNDISSWTKGRSGEALSLLKKRFSHRPVQEKFVCLNCGFETHADEQAALNIARSWLFLRSQEYKKYQTNKTTGNTDKRAFVETWQSFYRKKLKEVWKPAV

SEQ ID NO: 26990 - protein, 979 aa, Artificial Sequence
  CasX Variant
QEIKRINKIRRRLVKDSNTKKAGKTGPMKTLLVRVMTPDLRERLENLRKKPENIPQPISNTSRANLNKLLTDYTEMKKAILHVYWEEFQKDPVGLMSRVAQPASKKIDQNKLKPEMDEKGNLTTAGFACSQCGQPLFVYKLEQVSEKGKAYTNYFGRCNVAEHEKLILLAQLKPEKDSDEAVTYSLGKFGQRALDFYSIHVTKESTHPVKPLAQIAGNRYASGPVGKALSDACMGTIASFLSKYQDIIIEHQKVVKGNQKRLESLRELAGKENLEYPSVTLPPQPHTKEGVDAYNEVIARVRMWVNLNLWQKLKLSRDDAKPLLRLKGFPSFPLVERQANEVDWWDMVCNVKKLINEKKEDGKVFWQNLAGYKRQEALRPYLSSEEDRKKGKKFARYQLGDLLLHLEKKHGEWDWGKVYDEAWERIDKKVEGLSKHIKLEEERRSEDAQSKAALTDWLRAKASFVIEGLKEADKDEFCRCELKLQKWYGDLRGKPFAIEAENSILDISGFSKQYNCAFIWQKDGVKKLNLYLIINYFKGGKLRFKKIKPEAFEANRFYTVINKKSGEIVPMEVNFNFDDPNLIILPLAFGKRQGREFIWNDLLSLETGSLKLANGRVIEKTLYNRRTRQDEPALFVALTFERREVLDSSNIKPMNLIGVDRGENIPAVIALTDPEGCPLSRFKDSLGNPTHILRIGESYKEKQRTIQAKKEVEQRRAGGYSRKYASKAKNLADDMVRNTARDLLYYAVTQDAMLIFENLSRGFGRQGKRTFMAERQYTRMEDWLTAKLAYEGLPSKTYLSKTLAQYTSKTCSNCGFTITSADYDRVLEKLKKTATGWMTTINGKELKVEGQITYYNRYKRQNVVKDLSVELDRLSEESVNNDISSWTKGRSGEALSLLKKRFSHRPVQEKFVCLNCGFETHADEQAALNIARSWLFLRSQEYKKYQTNKTTGNTDKRAFVETWQSFYRKKLKEVWKPAV

SEQ ID NO: 26991 - protein, 979 aa, Artificial Sequence
  CasX Variant
QEIKRINKIRRRLVKDSNTKKAGKTGPMKTLLVRVMTPDLRERLENLRKKPENIPQPISNTSRANLNKLLTDYTEMKKAILHVYWEEFQKDPVGLMSRVAQPASKKIDQNKLKPEMDEKGNLTTAGFACSQCGQPLFVYKLEQVSEKGKAYTNYFGRCNVAEHEKLILLAQLKPEKDSDEAVTYSLGKFGQRALDFYSIHVTKESTHPVKPLAQIAGNRYASGPVGKALSDACMGTIASFLSKYQDIIIEHQKVVKGNQKRLESLRELAGKENLEYPSVTLPPQPHTKEGVDAYNEVIARVRMWVNLNLWQKLKLSRDDAKPLLRLKGFPSFPLVERQANEVDWWDMVCNVKKLINEKKEDGKVFWQNLAGYKRQEALRPYLSSEEDRKKGKKFARYQLGDLLLHLEKKHGEYDWGKVYDEAWERIDKKVEGLSKHIKLEEERRSEDAQSKAALTDWLRAKASFVIEGLKEADKDEFCRCELKLQKWYGDLRGKPFAIEAENSILDISGFSKQYNCAFIWQKDGVKKLNLYLIINYFKGGKLRFKKIKPEAFEANRFYTVINKKSGEIVPMEVNFNFDDPNLIILPLAFGKRQGREFIWNDLLSLETGSLKLANGRVIEKTLYNRRTRQDEPALFVALTFERREVLDSSNIKPMNLIGVDRGENIPAVIALTDPEGCPLSRFKDSLGNPTHILRIGESYKEKQRTIQAKKEVEQRRAGGYSRKYASKAKNLADDMVRNTARDLLYYAVTQDAMLIFENLSRGFGRQGKRTFMAERQYTRMEDWLTAKLAYEGLPSKTYLSKTLAQYTSKTCSNCGFTITSADYDRVLEKLKKTATGWMTTINGKELKVEGQITYYNRYKRQNVVKDLSVELDRLSEESVNNDISSWTKGRSGEALSLLKKRFSHRPVQEKFVCLNCGFETHADEQAALNIARSWLFLRSQEYKKYQTNKTTGNTDKRAFVETWQSFYRKKLKEVWKPAV

SEQ ID NO: 26992 - protein, 979 aa, Artificial Sequence
  CasX Variant
QEIKRINKIRRRLVKDSNTKKAGKTGPMKTLLVRVMTPDLRERLENLRKKPENIPQPISNTSRANLNKLLTDYTEMKKAILHVYWEEFQKDPVGLMSRVAQPASKKIDQNKLKPEMDEKGNLTTAGFACSQCGQPLFVYKLEQVSEKGKAYTNYFGRCNVAEHEKLILLAQLKPEKDSDEAVTYSLGKFGQRALDFYSIHVTKESTHPVKPLAQIAGNRYASGPVGKALSDACMGTIASFLSKYQDIIIEHQKVVKGNQKRLESLRELAGKENLEYPSVTLPPQPHTKEGVDAYNEVIARVRMWVNLNLWQKLKLSRDDAKPLLRLKGFPSFPLVERQANEVDWWDMVCNVKKLINEKKEDGKVFWQNLAGYKRQEALRPYLSSEEDRKKGKKFARYQLGDLLLHLEKKHGEDYWGKVYDEAWERIDKKVEGLSKHIKLEEERRSEDAQSKAALTDWLRAKASFVIEGLKEADKDEFCRCELKLQKWYGDLRGKPFAIEAENSILDISGFSKQYNCAFIWQKDGVKKLNLYLIINYFKGGKLRFKKIKPEAFEANRFYTVINKKSGEIVPMEVNFNFDDPNLIILPLAFGKRQGREFIWNDLLSLETGSLKLANGRVIEKTLYNRRTRQDEPALFVALTFERREVLDSSNIKPMNLIGVDRGENIPAVIALTDPEGCPLSRFKDSLGNPTHILRIGESYKEKQRTIQAKKEVEQRRAGGYSRKYASKAKNLADDMVRNTARDLLYYAVTQDAMLIFENLSRGFGRQGKRTFMAERQYTRMEDWLTAKLAYEGLPSKTYLSKTLAQYTSKTCSNCGFTITSADYDRVLEKLKKTATGWMTTINGKELKVEGQITYYNRYKRQNVVKDLSVELDRLSEESVNNDISSWTKGRSGEALSLLKKRFSHRPVQEKFVCLNCGFETHADEQAALNIARSWLFLRSQEYKKYQTNKTTGNTDKRAFVETWQSFYRKKLKEVWKPAV

SEQ ID NO: 26993 - protein, 978 aa, Artificial Sequence
  CasX Variant
QEIKRINKIRRRLVKDSNTKKAGKTGPMKTLLVRVMTPDLRERLENLRKKPENIPQPISNTSRANLNKLLTDYTEMKKAILHVYWEEFQKDPVGLMSRVAQPASKKIDQNKLKPEMDEKGNLTTAGFACSQCGQPLFVYKLEQVSEKGKAYTNYFGRCNVAEHEKLILLAQLKPEKDSDEAVTYSLGKFGQRALDFYSIHVTKESTHPVKPLAQIAGNRYASGPVGKALSDACMGTIASFLSKYQDIIIEHQKVVKGNQKRLESLRELAGKENLEYPSVTLPPQPHTKEGVDAYNEVIARVRMWVNLNLWQKLKLSRDDAKPLLRLKGFPSFPLVERQANEVDWWDMVCNVKKLINEKKEDGKVFWQNLAGYKRQEALRPYLSSEEDRKKGKKFARYQLGDLLLHLEKKHGEDRGKVYDEAWERIDKKVEGLSKHIKLEEERRSEDAQSKAALTDWLRAKASFVIEGLKEADKDEFCRCELKLQKWYGDLRGKPFAIEAENSILDISGFSKQYNCAFIWQKDGVKKLNLYLIINYFKGGKLRFKKIKPEAFEANRFYTVINKKSGEIVPMEVNFNFDDPNLIILPLAFGKRQGREFIWNDLLSLETGSLKLANGRVIEKTLYNRRTRQDEPALFVALTFERREVLDSSNIKPMNLIGVDRGENIPAVIALTDPEGCPLSRFKDSLGNPTHILRIGESYKEKQRTIQAKKEVEQRRAGGYSRKYASKAKNLADDMVRNTARDLLYYAVTQDAMLIFENLSRGFGRQGKRTFMAERQYTRMEDWLTAKLAYEGLPSKTYLSKTLAQYTSKTCSNCGFTITSADYDRVLEKLKKTATGWMTTINGKELKVEGQITYYNRYKRQNVVKDLSVELDRLSEESVNNDISSWTKGRSGEALSLLKKRFSHRPVQEKFVCLNCGFETHADEQAALNIARSWLFLRSQEYKKYQTNKTTGNTDKRAFVETWQSFYRKKLKEVWKPAV

SEQ ID NO: 26994 - protein, 978 aa, Artificial Sequence
  CasX Variant
QEIKRINKIRRRLVKDSNTKKAGKTGPMKTLLVRVMTPDLRERLENLRKKPENIPQPISNTSRANLNKLLTDYTEMKKAILHVYWEEFQKDPVGLMSRVAQPASKKIDQNKLKPEMDEKGNLTTAGFACSQCGQPLFVYKLEQVSEKGKAYTNYFGRCNVAEHEKLILLAQLKPEKDSDEAVTYSLGKFGQRALDFYSIHVTKESTHPVKPLAQIAGNRYASGPVGKALSDACMGTIASFLSKYQDIIIEHQKVVKGNQKRLESLRELAGKENLEYPSVTLPPQPHTKEGVDAYNEVIARVRMWVNLNLWQKLKLSRDDAKPLLRLKGFPSFPLVERQANEVDWWDMVCNVKKLINEKKEDGKVFWQNLAGYKRQEALRPYLSSEEDRKKGKKFARYQLGDLLLHLEKKHGEDWGDVYDEAWERIDKKVEGLSKHIKLEEERRSEDAQSKAALTDWLRAKASFVIEGLKEADKDEFCRCELKLQKWYGDLRGKPFAIEAENSILDISGFSKQYNCAFIWQKDGVKKLNLYLIINYFKGGKLRFKKIKPEAFEANRFYTVINKKSGEIVPMEVNFNFDDPNLIILPLAFGKRQGREFIWNDLLSLETGSLKLANGRVIEKTLYNRRTRQDEPALFVALTFERREVLDSSNIKPMNLIGVDRGENIPAVIALTDPEGCPLSRFKDSLGNPTHILRIGESYKEKQRTIQAKKEVEQRRAGGYSRKYASKAKNLADDMVRNTARDLLYYAVTQDAMLIFENLSRGFGRQGKRTFMAERQYTRMEDWLTAKLAYEGLPSKTYLSKTLAQYTSKTCSNCGFTITSADYDRVLEKLKKTATGWMTTINGKELKVEGQITYYNRYKRQNVVKDLSVELDRLSEESVNNDISSWTKGRSGEALSLLKKRFSHRPVQEKFVCLNCGFETHADEQAALNIARSWLFLRSQEYKKYQTNKTTGNTDKRAFVETWQSFYRKKLKEVWKPAV

SEQ ID NO: 26995 - protein, 978 aa, Artificial Sequence
  CasX Variant
QEIKRINKIRRRLVKDSNTKKAGKTGPMKTLLVRVMTPDLRERLENLRKKPENIPQPISNTSRANLNKLLTDYTEMKKAILHVYWEEFQKDPVGLMSRVAQPASKKIDQNKLKPEMDEKGNLTTAGFACSQCGQPLFVYKLEQVSEKGKAYTNYFGRCNVAEHEKLILLAQLKPEKDSDEAVTYSLGKFGQRALDFYSIHVTKESTHPVKPLAQIAGNRYASGPVGKALSDACMGTIASFLSKYQDIIIEHQKVVKGNQKRLESLRELAGKENLEYPSVTLPPQPHTKEGVDAYNEVIARVRMWVNLNLWQKLKLSRDDAKPLLRLKGFPSFPLVERQANEVDWWDMVCNVKKLINEKKEDGKVFWQNLAGYKRQEALRPYLSSEEDRKKGKKFARYQLGDLLLHLEKKHGEDWGPVYDEAWERIDKKVEGLSKHIKLEEERRSEDAQSKAALTDWLRAKASFVIEGLKEADKDEFCRCELKLQKWYGDLRGKPFAIEAENSILDISGFSKQYNCAFIWQKDGVKKLNLYLIINYFKGGKLRFKKIKPEAFEANRFYTVINKKSGEIVPMEVNFNFDDPNLIILPLAFGKRQGREFIWNDLLSLETGSLKLANGRVIEKTLYNRRTRQDEPALFVALTFERREVLDSSNIKPMNLIGVDRGENIPAVIALTDPEGCPLSRFKDSLGNPTHILRIGESYKEKQRTIQAKKEVEQRRAGGYSRKYASKAKNLADDMVRNTARDLLYYAVTQDAMLIFENLSRGFGRQGKRTFMAERQYTRMEDWLTAKLAYEGLPSKTYLSKTLAQYTSKTCSNCGFTITSADYDRVLEKLKKTATGWMTTINGKELKVEGQITYYNRYKRQNVVKDLSVELDRLSEESVNNDISSWTKGRSGEALSLLKKRFSHRPVQEKFVCLNCGFETHADEQAALNIARSWLFLRSQEYKKYQTNKTTGNTDKRAFVETWQSFYRKKLKEVWKPAV

SEQ ID NO: 26996 - protein, 978 aa, Artificial Sequence
  CasX Variant
QEIKRINKIRRRLVKDSNTKKAGKTGPMKTLLVRVMTPDLRERLENLRKKPENIPQPISNTSRANLNKLLTDYTEMKKAILHVYWEEFQKDPVGLMSRVAQPASKKIDQNKLKPEMDEKGNLTTAGFACSQCGQPLFVYKLEQVSEKGKAYTNYFGRCNVAEHEKLILLAQLKPEKDSDEAVTYSLGKFGQRALDFYSIHVTKESTHPVKPLAQIAGNRYASGPVGKALSDACMGTIASFLSKYQDIIIEHQKVVKGNQKRLESLRELAGKENLEYPSVTLPPQPHTKEGVDAYNEVIARVRMWVNLNLWQKLKLSRDDAKPLLRLKGFPSFPLVERQANEVDWWDMVCNVKKLINEKKEDGKVFWQNLAGYKRQEALRPYLSSEEDRKKGKKFARYQLGDLLLHLEKKHGEDWGKLYDEAWERIDKKVEGLSKHIKLEEERRSEDAQSKAALTDWLRAKASFVIEGLKEADKDEFCRCELKLQKWYGDLRGKPFAIEAENSILDISGFSKQYNCAFIWQKDGVKKLNLYLIINYFKGGKLRFKKIKPEAFEANRFYTVINKKSGEIVPMEVNFNFDDPNLIILPLAFGKRQGREFIWNDLLSLETGSLKLANGRVIEKTLYNRRTRQDEPALFVALTFERREVLDSSNIKPMNLIGVDRGENIPAVIALTDPEGCPLSRFKDSLGNPTHILRIGESYKEKQRTIQAKKEVEQRRAGGYSRKYASKAKNLADDMVRNTARDLLYYAVTQDAMLIFENLSRGFGRQGKRTFMAERQYTRMEDWLTAKLAYEGLPSKTYLSKTLAQYTSKTCSNCGFTITSADYDRVLEKLKKTATGWMTTINGKELKVEGQITYYNRYKRQNVVKDLSVELDRLSEESVNNDISSWTKGRSGEALSLLKKRFSHRPVQEKFVCLNCGFETHADEQAALNIARSWLFLRSQEYKKYQTNKTTGNTDKRAFVETWQSFYRKKLKEVWKPAV

SEQ ID NO: 26997 - protein, 978 aa, Artificial Sequence
  CasX Variant
QEIKRINKIRRRLVKDSNTKKAGKTGPMKTLLVRVMTPDLRERLENLRKKPENIPQPISNTSRANLNKLLTDYTEMKKAILHVYWEEFQKDPVGLMSRVAQPASKKIDQNKLKPEMDEKGNLTTAGFACSQCGQPLFVYKLEQVSEKGKAYTNYFGRCNVAEHEKLILLAQLKPEKDSDEAVTYSLGKFGQRALDFYSIHVTKESTHPVKPLAQIAGNRYASGPVGKALSDACMGTIASFLSKYQDIIIEHQKVVKGNQKRLESLRELAGKENLEYPSVTLPPQPHTKEGVDAYNEVIARVRMWVNLNLWQKLKLSRDDAKPLLRLKGFPSFPLVERQANEVDWWDMVCNVKKLINEKKEDGKVFWQNLAGYKRQEALRPYLSSEEDRKKGKKFARYQLGDLLLHLEKKHGEDWGKVYGEAWERIDKKVEGLSKHIKLEEERRSEDAQSKAALTDWLRAKASFVIEGLKEADKDEFCRCELKLQKWYGDLRGKPFAIEAENSILDISGFSKQYNCAFIWQKDGVKKLNLYLIINYFKGGKLRFKKIKPEAFEANRFYTVINKKSGEIVPMEVNFNFDDPNLIILPLAFGKRQGREFIWNDLLSLETGSLKLANGRVIEKTLYNRRTRQDEPALFVALTFERREVLDSSNIKPMNLIGVDRGENIPAVIALTDPEGCPLSRFKDSLGNPTHILRIGESYKEKQRTIQAKKEVEQRRAGGYSRKYASKAKNLADDMVRNTARDLLYYAVTQDAMLIFENLSRGFGRQGKRTFMAERQYTRMEDWLTAKLAYEGLPSKTYLSKTLAQYTSKTCSNCGFTITSADYDRVLEKLKKTATGWMTTINGKELKVEGQITYYNRYKRQNVVKDLSVELDRLSEESVNNDISSWTKGRSGEALSLLKKRFSHRPVQEKFVCLNCGFETHADEQAALNIARSWLFLRSQEYKKYQTNKTTGNTDKRAFVETWQSFYRKKLKEVWKPAV

SEQ ID NO: 26998 - protein, 978 aa, Artificial Sequence
  CasX Variant
QEIKRINKIRRRLVKDSNTKKAGKTGPMKTLLVRVMTPDLRERLENLRKKPENIPQPISNTSRANLNKLLTDYTEMKKAILHVYWEEFQKDPVGLMSRVAQPASKKIDQNKLKPEMDEKGNLTTAGFACSQCGQPLFVYKLEQVSEKGKAYTNYFGRCNVAEHEKLILLAQLKPEKDSDEAVTYSLGKFGQRALDFYSIHVTKESTHPVKPLAQIAGNRYASGPVGKALSDACMGTIASFLSKYQDIIIEHQKVVKGNQKRLESLRELAGKENLEYPSVTLPPQPHTKEGVDAYNEVIARVRMWVNLNLWQKLKLSRDDAKPLLRLKGFPSFPLVERQANEVDWWDMVCNVKKLINEKKEDGKVFWQNLAGYKRQEALRPYLSSEEDRKKGKKFARYQLGDLLLHLEKKHGEDWGKVYDEAWERIDKKVEGLSKHQKLEEERRSEDAQSKAALTDWLRAKASFVIEGLKEADKDEFCRCELKLQKWYGDLRGKPFAIEAENSILDISGFSKQYNCAFIWQKDGVKKLNLYLIINYFKGGKLRFKKIKPEAFEANRFYTVINKKSGEIVPMEVNFNFDDPNLIILPLAFGKRQGREFIWNDLLSLETGSLKLANGRVIEKTLYNRRTRQDEPALFVALTFERREVLDSSNIKPMNLIGVDRGENIPAVIALTDPEGCPLSRFKDSLGNPTHILRIGESYKEKQRTIQAKKEVEQRRAGGYSRKYASKAKNLADDMVRNTARDLLYYAVTQDAMLIFENLSRGFGRQGKRTFMAERQYTRMEDWLTAKLAYEGLPSKTYLSKTLAQYTSKTCSNCGFTITSADYDRVLEKLKKTATGWMTTINGKELKVEGQITYYNRYKRQNVVKDLSVELDRLSEESVNNDISSWTKGRSGEALSLLKKRFSHRPVQEKFVCLNCGFETHADEQAALNIARSWLFLRSQEYKKYQTNKTTGNTDKRAFVETWQSFYRKKLKEVWKPAV

SEQ ID NO: 26999 - protein, 978 aa, Artificial Sequence
  CasX Variant
QEIKRINKIRRRLVKDSNTKKAGKTGPMKTLLVRVMTPDLRERLENLRKKPENIPQPISNTSRANLNKLLTDYTEMKKAILHVYWEEFQKDPVGLMSRVAQPASKKIDQNKLKPEMDEKGNLTTAGFACSQCGQPLFVYKLEQVSEKGKAYTNYFGRCNVAEHEKLILLAQLKPEKDSDEAVTYSLGKFGQRALDFYSIHVTKESTHPVKPLAQIAGNRYASGPVGKALSDACMGTIASFLSKYQDIIIEHQKVVKGNQKRLESLRELAGKENLEYPSVTLPPQPHTKEGVDAYNEVIARVRMWVNLNLWQKLKLSRDDAKPLLRLKGFPSFPLVERQANEVDWWDMVCNVKKLINEKKEDGKVFWQNLAGYKRQEALRPYLSSEEDRKKGKKFARYQLGDLLLHLEKKHGEDWGKVYDEAWERIDKKVEGLSKHIKLEEEDRSEDAQSKAALTDWLRAKASFVIEGLKEADKDEFCRCELKLQKWYGDLRGKPFAIEAENSILDISGFSKQYNCAFIWQKDGVKKLNLYLIINYFKGGKLRFKKIKPEAFEANRFYTVINKKSGEIVPMEVNFNFDDPNLIILPLAFGKRQGREFIWNDLLSLETGSLKLANGRVIEKTLYNRRTRQDEPALFVALTFERREVLDSSNIKPMNLIGVDRGENIPAVIALTDPEGCPLSRFKDSLGNPTHILRIGESYKEKQRTIQAKKEVEQRRAGGYSRKYASKAKNLADDMVRNTARDLLYYAVTQDAMLIFENLSRGFGRQGKRTFMAERQYTRMEDWLTAKLAYEGLPSKTYLSKTLAQYTSKTCSNCGFTITSADYDRVLEKLKKTATGWMTTINGKELKVEGQITYYNRYKRQNVVKDLSVELDRLSEESVNNDISSWTKGRSGEALSLLKKRFSHRPVQEKFVCLNCGFETHADEQAALNIARSWLFLRSQEYKKYQTNKTTGNTDKRAFVETWQSFYRKKLKEVWKPAV

SEQ ID NO: 27000 - protein, 978 aa, Artificial Sequence
  CasX Variant
QEIKRINKIRRRLVKDSNTKKAGKTGPMKTLLVRVMTPDLRERLENLRKKPENIPQPISNTSRANLNKLLTDYTEMKKAILHVYWEEFQKDPVGLMSRVAQPASKKIDQNKLKPEMDEKGNLTTAGFACSQCGQPLFVYKLEQVSEKGKAYTNYFGRCNVAEHEKLILLAQLKPEKDSDEAVTYSLGKFGQRALDFYSIHVTKESTHPVKPLAQIAGNRYASGPVGKALSDACMGTIASFLSKYQDIIIEHQKVVKGNQKRLESLRELAGKENLEYPSVTLPPQPHTKEGVDAYNEVIARVRMWVNLNLWQKLKLSRDDAKPLLRLKGFPSFPLVERQANEVDWWDMVCNVKKLINEKKEDGKVFWQNLAGYKRQEALRPYLSSEEDRKKGKKFARYQLGDLLLHLEKKHGEDWGKVYDEAWERIDKKVEGLSKHIKLEEERRSEDAQSKAATTDWLRAKASFVIEGLKEADKDEFCRCELKLQKWYGDLRGKPFAIEAENSILDISGFSKQYNCAFIWQKDGVKKLNLYLIINYFKGGKLRFKKIKPEAFEANRFYTVINKKSGEIVPMEVNFNFDDPNLIILPLAFGKRQGREFIWNDLLSLETGSLKLANGRVIEKTLYNRRTRQDEPALFVALTFERREVLDSSNIKPMNLIGVDRGENIPAVIALTDPEGCPLSRFKDSLGNPTHILRIGESYKEKQRTIQAKKEVEQRRAGGYSRKYASKAKNLADDMVRNTARDLLYYAVTQDAMLIFENLSRGFGRQGKRTFMAERQYTRMEDWLTAKLAYEGLPSKTYLSKTLAQYTSKTCSNCGFTITSADYDRVLEKLKKTATGWMTTINGKELKVEGQITYYNRYKRQNVVKDLSVELDRLSEESVNNDISSWTKGRSGEALSLLKKRFSHRPVQEKFVCLNCGFETHADEQAALNIARSWLFLRSQEYKKYQTNKTTGNTDKRAFVETWQSFYRKKLKEVWKPAV

SEQ ID NO: 27001 - protein, 978 aa, Artificial Sequence
  CasX Variant
QEIKRINKIRRRLVKDSNTKKAGKTGPMKTLLVRVMTPDLRERLENLRKKPENIPQPISNTSRANLNKLLTDYTEMKKAILHVYWEEFQKDPVGLMSRVAQPASKKIDQNKLKPEMDEKGNLTTAGFACSQCGQPLFVYKLEQVSEKGKAYTNYFGRCNVAEHEKLILLAQLKPEKDSDEAVTYSLGKFGQRALDFYSIHVTKESTHPVKPLAQIAGNRYASGPVGKALSDACMGTIASFLSKYQDIIIEHQKVVKGNQKRLESLRELAGKENLEYPSVTLPPQPHTKEGVDAYNEVIARVRMWVNLNLWQKLKLSRDDAKPLLRLKGFPSFPLVERQANEVDWWDMVCNVKKLINEKKEDGKVFWQNLAGYKRQEALRPYLSSEEDRKKGKKFARYQLGDLLLHLEKKHGEDWGKVYDEAWERIDKKVEGLSKHIKLEEERRSEDAQSKAALTDWLRAKTSFVIEGLKEADKDEFCRCELKLQKWYGDLRGKPFAIEAENSILDISGFSKQYNCAFIWQKDGVKKLNLYLIINYFKGGKLRFKKIKPEAFEANRFYTVINKKSGEIVPMEVNFNFDDPNLIILPLAFGKRQGREFIWNDLLSLETGSLKLANGRVIEKTLYNRRTRQDEPALFVALTFERREVLDSSNIKPMNLIGVDRGENIPAVIALTDPEGCPLSRFKDSLGNPTHILRIGESYKEKQRTIQAKKEVEQRRAGGYSRKYASKAKNLADDMVRNTARDLLYYAVTQDAMLIFENLSRGFGRQGKRTFMAERQYTRMEDWLTAKLAYEGLPSKTYLSKTLAQYTSKTCSNCGFTITSADYDRVLEKLKKTATGWMTTINGKELKVEGQITYYNRYKRQNVVKDLSVELDRLSEESVNNDISSWTKGRSGEALSLLKKRFSHRPVQEKFVCLNCGFETHADEQAALNIARSWLFLRSQEYKKYQTNKTTGNTDKRAFVETWQSFYRKKLKEVWKPAV

SEQ ID NO: 27002 - protein, 978 aa, Artificial Sequence
  CasX Variant
QEIKRINKIRRRLVKDSNTKKAGKTGPMKTLLVRVMTPDLRERLENLRKKPENIPQPISNTSRANLNKLLTDYTEMKKAILHVYWEEFQKDPVGLMSRVAQPASKKIDQNKLKPEMDEKGNLTTAGFACSQCGQPLFVYKLEQVSEKGKAYTNYFGRCNVAEHEKLILLAQLKPEKDSDEAVTYSLGKFGQRALDFYSIHVTKESTHPVKPLAQIAGNRYASGPVGKALSDACMGTIASFLSKYQDIIIEHQKVVKGNQKRLESLRELAGKENLEYPSVTLPPQPHTKEGVDAYNEVIARVRMWVNLNLWQKLKLSRDDAKPLLRLKGFPSFPLVERQANEVDWWDMVCNVKKLINEKKEDGKVFWQNLAGYKRQEALRPYLSSEEDRKKGKKFARYQLGDLLLHLEKKHGEDWGKVYDEAWERIDKKVEGLSKHIKLEEERRSEDAQSKAALTDWLRAKKSFVIEGLKEADKDEFCRCELKLQKWYGDLRGKPFAIEAENSILDISGFSKQYNCAFIWQKDGVKKLNLYLIINYFKGGKLRFKKIKPEAFEANRFYTVINKKSGEIVPMEVNFNFDDPNLIILPLAFGKRQGREFIWNDLLSLETGSLKLANGRVIEKTLYNRRTRQDEPALFVALTFERREVLDSSNIKPMNLIGVDRGENIPAVIALTDPEGCPLSRFKDSLGNPTHILRIGESYKEKQRTIQAKKEVEQRRAGGYSRKYASKAKNLADDMVRNTARDLLYYAVTQDAMLIFENLSRGFGRQGKRTFMAERQYTRMEDWLTAKLAYEGLPSKTYLSKTLAQYTSKTCSNCGFTITSADYDRVLEKLKKTATGWMTTINGKELKVEGQITYYNRYKRQNVVKDLSVELDRLSEESVNNDISSWTKGRSGEALSLLKKRFSHRPVQEKFVCLNCGFETHADEQAALNIARSWLFLRSQEYKKYQTNKTTGNTDKRAFVETWQSFYRKKLKEVWKPAV

SEQ ID NO: 27003 - protein, 978 aa, Artificial Sequence
  CasX Variant
QEIKRINKIRRRLVKDSNTKKAGKTGPMKTLLVRVMTPDLRERLENLRKKPENIPQPISNTSRANLNKLLTDYTEMKKAILHVYWEEFQKDPVGLMSRVAQPASKKIDQNKLKPEMDEKGNLTTAGFACSQCGQPLFVYKLEQVSEKGKAYTNYFGRCNVAEHEKLILLAQLKPEKDSDEAVTYSLGKFGQRALDFYSIHVTKESTHPVKPLAQIAGNRYASGPVGKALSDACMGTIASFLSKYQDIIIEHQKVVKGNQKRLESLRELAGKENLEYPSVTLPPQPHTKEGVDAYNEVIARVRMWVNLNLWQKLKLSRDDAKPLLRLKGFPSFPLVERQANEVDWWDMVCNVKKLINEKKEDGKVFWQNLAGYKRQEALRPYLSSEEDRKKGKKFARYQLGDLLLHLEKKHGEDWGKVYDEAWERIDKKVEGLSKHIKLEEERRSEDAQSKAALTDWLRAKASFVEEGLKEADKDEFCRCELKLQKWYGDLRGKPFAIEAENSILDISGFSKQYNCAFIWQKDGVKKLNLYLIINYFKGGKLRFKKIKPEAFEANRFYTVINKKSGEIVPMEVNFNFDDPNLIILPLAFGKRQGREFIWNDLLSLETGSLKLANGRVIEKTLYNRRTRQDEPALFVALTFERREVLDSSNIKPMNLIGVDRGENIPAVIALTDPEGCPLSRFKDSLGNPTHILRIGESYKEKQRTIQAKKEVEQRRAGGYSRKYASKAKNLADDMVRNTARDLLYYAVTQDAMLIFENLSRGFGRQGKRTFMAERQYTRMEDWLTAKLAYEGLPSKTYLSKTLAQYTSKTCSNCGFTITSADYDRVLEKLKKTATGWMTTINGKELKVEGQITYYNRYKRQNVVKDLSVELDRLSEESVNNDISSWTKGRSGEALSLLKKRFSHRPVQEKFVCLNCGFETHADEQAALNIARSWLFLRSQEYKKYQTNKTTGNTDKRAFVETWQSFYRKKLKEVWKPAV

SEQ ID NO: 27004 - protein, 979 aa, Artificial Sequence
  CasX Variant
QEIKRINKIRRRLVKDSNTKKAGKTGPMKTLLVRVMTPDLRERLENLRKKPENIPQPISNTSRANLNKLLTDYTEMKKAILHVYWEEFQKDPVGLMSRVAQPASKKIDQNKLKPEMDEKGNLTTAGFACSQCGQPLFVYKLEQVSEKGKAYTNYFGRCNVAEHEKLILLAQLKPEKDSDEAVTYSLGKFGQRALDFYSIHVTKESTHPVKPLAQIAGNRYASGPVGKALSDACMGTIASFLSKYQDIIIEHQKVVKGNQKRLESLRELAGKENLEYPSVTLPPQPHTKEGVDAYNEVIARVRMWVNLNLWQKLKLSRDDAKPLLRLKGFPSFPLVERQANEVDWWDMVCNVKKLINEKKEDGKVFWQNLAGYKRQEALRPYLSSEEDRKKGKKFARYQLGDLLLHLEKKHGEDWGKVYDEAWERIDKKVEGLSKHIKLEEERRSEDAQSKAALTDWLRAKASFVISEGLKEADKDEFCRCELKLQKWYGDLRGKPFAIEAENSILDISGFSKQYNCAFIWQKDGVKKLNLYLIINYFKGGKLRFKKIKPEAFEANRFYTVINKKSGEIVPMEVNFNFDDPNLIILPLAFGKRQGREFIWNDLLSLETGSLKLANGRVIEKTLYNRRTRQDEPALFVALTFERREVLDSSNIKPMNLIGVDRGENIPAVIALTDPEGCPLSRFKDSLGNPTHILRIGESYKEKQRTIQAKKEVEQRRAGGYSRKYASKAKNLADDMVRNTARDLLYYAVTQDAMLIFENLSRGFGRQGKRTFMAERQYTRMEDWLTAKLAYEGLPSKTYLSKTLAQYTSKTCSNCGFTITSADYDRVLEKLKKTATGWMTTINGKELKVEGQITYYNRYKRQNVVKDLSVELDRLSEESVNNDISSWTKGRSGEALSLLKKRFSHRPVQEKFVCLNCGFETHADEQAALNIARSWLFLRSQEYKKYQTNKTTGNTDKRAFVETWQSFYRKKLKEVWKPAV

SEQ ID NO: 27005 - protein, 979 aa, Artificial Sequence
  CasX Variant
QEIKRINKIRRRLVKDSNTKKAGKTGPMKTLLVRVMTPDLRERLENLRKKPENIPQPISNTSRANLNKLLTDYTEMKKAILHVYWEEFQKDPVGLMSRVAQPASKKIDQNKLKPEMDEKGNLTTAGFACSQCGQPLFVYKLEQVSEKGKAYTNYFGRCNVAEHEKLILLAQLKPEKDSDEAVTYSLGKFGQRALDFYSIHVTKESTHPVKPLAQIAGNRYASGPVGKALSDACMGTIASFLSKYQDIIIEHQKVVKGNQKRLESLRELAGKENLEYPSVTLPPQPHTKEGVDAYNEVIARVRMWVNLNLWQKLKLSRDDAKPLLRLKGFPSFPLVERQANEVDWWDMVCNVKKLINEKKEDGKVFWQNLAGYKRQEALRPYLSSEEDRKKGKKFARYQLGDLLLHLEKKHGEDWGKVYDEAWERIDKKVEGLSKHIKLEEERRSEDAQSKAALTDWLRAKASFVIERGLKEADKDEFCRCELKLQKWYGDLRGKPFAIEAENSILDISGFSKQYNCAFIWQKDGVKKLNLYLIINYFKGGKLRFKKIKPEAFEANRFYTVINKKSGEIVPMEVNFNFDDPNLIILPLAFGKRQGREFIWNDLLSLETGSLKLANGRVIEKTLYNRRTRQDEPALFVALTFERREVLDSSNIKPMNLIGVDRGENIPAVIALTDPEGCPLSRFKDSLGNPTHILRIGESYKEKQRTIQAKKEVEQRRAGGYSRKYASKAKNLADDMVRNTARDLLYYAVTQDAMLIFENLSRGFGRQGKRTFMAERQYTRMEDWLTAKLAYEGLPSKTYLSKTLAQYTSKTCSNCGFTITSADYDRVLEKLKKTATGWMTTINGKELKVEGQITYYNRYKRQNVVKDLSVELDRLSEESVNNDISSWTKGRSGEALSLLKKRFSHRPVQEKFVCLNCGFETHADEQAALNIARSWLFLRSQEYKKYQTNKTTGNTDKRAFVETWQSFYRKKLKEVWKPAV

SEQ ID NO: 27006 - protein, 978 aa, Artificial Sequence
  CasX Variant
QEIKRINKIRRRLVKDSNTKKAGKTGPMKTLLVRVMTPDLRERLENLRKKPENIPQPISNTSRANLNKLLTDYTEMKKAILHVYWEEFQKDPVGLMSRVAQPASKKIDQNKLKPEMDEKGNLTTAGFACSQCGQPLFVYKLEQVSEKGKAYTNYFGRCNVAEHEKLILLAQLKPEKDSDEAVTYSLGKFGQRALDFYSIHVTKESTHPVKPLAQIAGNRYASGPVGKALSDACMGTIASFLSKYQDIIIEHQKVVKGNQKRLESLRELAGKENLEYPSVTLPPQPHTKEGVDAYNEVIARVRMWVNLNLWQKLKLSRDDAKPLLRLKGFPSFPLVERQANEVDWWDMVCNVKKLINEKKEDGKVFWQNLAGYKRQEALRPYLSSEEDRKKGKKFARYQLGDLLLHLEKKHGEDWGKVYDEAWERIDKKVEGLSKHIKLEEERRSEDAQSKAALTDWLRAKASFVIEGKKEADKDEFCRCELKLQKWYGDLRGKPFAIEAENSILDISGFSKQYNCAFIWQKDGVKKLNLYLIINYFKGGKLRFKKIKPEAFEANRFYTVINKKSGEIVPMEVNFNFDDPNLIILPLAFGKRQGREFIWNDLLSLETGSLKLANGRVIEKTLYNRRTRQDEPALFVALTFERREVLDSSNIKPMNLIGVDRGENIPAVIALTDPEGCPLSRFKDSLGNPTHILRIGESYKEKQRTIQAKKEVEQRRAGGYSRKYASKAKNLADDMVRNTARDLLYYAVTQDAMLIFENLSRGFGRQGKRTFMAERQYTRMEDWLTAKLAYEGLPSKTYLSKTLAQYTSKTCSNCGFTITSADYDRVLEKLKKTATGWMTTINGKELKVEGQITYYNRYKRQNVVKDLSVELDRLSEESVNNDISSWTKGRSGEALSLLKKRFSHRPVQEKFVCLNCGFETHADEQAALNIARSWLFLRSQEYKKYQTNKTTGNTDKRAFVETWQSFYRKKLKEVWKPAV

SEQ ID NO: 27007 - protein, 978 aa, Artificial Sequence
  CasX Variant
QEIKRINKIRRRLVKDSNTKKAGKTGPMKTLLVRVMTPDLRERLENLRKKPENIPQPISNTSRANLNKLLTDYTEMKKAILHVYWEEFQKDPVGLMSRVAQPASKKIDQNKLKPEMDEKGNLTTAGFACSQCGQPLFVYKLEQVSEKGKAYTNYFGRCNVAEHEKLILLAQLKPEKDSDEAVTYSLGKFGQRALDFYSIHVTKESTHPVKPLAQIAGNRYASGPVGKALSDACMGTIASFLSKYQDIIIEHQKVVKGNQKRLESLRELAGKENLEYPSVTLPPQPHTKEGVDAYNEVIARVRMWVNLNLWQKLKLSRDDAKPLLRLKGFPSFPLVERQANEVDWWDMVCNVKKLINEKKEDGKVFWQNLAGYKRQEALRPYLSSEEDRKKGKKFARYQLGDLLLHLEKKHGEDWGKVYDEAWERIDKKVEGLSKHIKLEEERRSEDAQSKAALTDWLRAKASFVIEGSKEADKDEFCRCELKLQKWYGDLRGKPFAIEAENSILDISGFSKQYNCAFIWQKDGVKKLNLYLIINYFKGGKLRFKKIKPEAFEANRFYTVINKKSGEIVPMEVNFNFDDPNLIILPLAFGKRQGREFIWNDLLSLETGSLKLANGRVIEKTLYNRRTRQDEPALFVALTFERREVLDSSNIKPMNLIGVDRGENIPAVIALTDPEGCPLSRFKDSLGNPTHILRIGESYKEKQRTIQAKKEVEQRRAGGYSRKYASKAKNLADDMVRNTARDLLYYAVTQDAMLIFENLSRGFGRQGKRTFMAERQYTRMEDWLTAKLAYEGLPSKTYLSKTLAQYTSKTCSNCGFTITSADYDRVLEKLKKTATGWMTTINGKELKVEGQITYYNRYKRQNVVKDLSVELDRLSEESVNNDISSWTKGRSGEALSLLKKRFSHRPVQEKFVCLNCGFETHADEQAALNIARSWLFLRSQEYKKYQTNKTTGNTDKRAFVETWQSFYRKKLKEVWKPAV

SEQ ID NO: 27008 - protein, 979 aa, Artificial Sequence
  CasX Variant
QEIKRINKIRRRLVKDSNTKKAGKTGPMKTLLVRVMTPDLRERLENLRKKPENIPQPISNTSRANLNKLLTDYTEMKKAILHVYWEEFQKDPVGLMSRVAQPASKKIDQNKLKPEMDEKGNLTTAGFACSQCGQPLFVYKLEQVSEKGKAYTNYFGRCNVAEHEKLILLAQLKPEKDSDEAVTYSLGKFGQRALDFYSIHVTKESTHPVKPLAQIAGNRYASGPVGKALSDACMGTIASFLSKYQDIIIEHQKVVKGNQKRLESLRELAGKENLEYPSVTLPPQPHTKEGVDAYNEVIARVRMWVNLNLWQKLKLSRDDAKPLLRLKGFPSFPLVERQANEVDWWDMVCNVKKLINEKKEDGKVFWQNLAGYKRQEALRPYLSSEEDRKKGKKFARYQLGDLLLHLEKKHGEDWGKVYDEAWERIDKKVEGLSKHIKLEEERRSEDAQSKAALTDWLRAKASFVIEGLKEADDKDEFCRCELKLQKWYGDLRGKPFAIEAENSILDISGFSKQYNCAFIWQKDGVKKLNLYLIINYFKGGKLRFKKIKPEAFEANRFYTVINKKSGEIVPMEVNFNFDDPNLIILPLAFGKRQGREFIWNDLLSLETGSLKLANGRVIEKTLYNRRTRQDEPALFVALTFERREVLDSSNIKPMNLIGVDRGENIPAVIALTDPEGCPLSRFKDSLGNPTHILRIGESYKEKQRTIQAKKEVEQRRAGGYSRKYASKAKNLADDMVRNTARDLLYYAVTQDAMLIFENLSRGFGRQGKRTFMAERQYTRMEDWLTAKLAYEGLPSKTYLSKTLAQYTSKTCSNCGFTITSADYDRVLEKLKKTATGWMTTINGKELKVEGQITYYNRYKRQNVVKDLSVELDRLSEESVNNDISSWTKGRSGEALSLLKKRFSHRPVQEKFVCLNCGFETHADEQAALNIARSWLFLRSQEYKKYQTNKTTGNTDKRAFVETWQSFYRKKLKEVWKPAV

SEQ ID NO: 27009 - protein, 979 aa, Artificial Sequence
  CasX Variant
QEIKRINKIRRRLVKDSNTKKAGKTGPMKTLLVRVMTPDLRERLENLRKKPENIPQPISNTSRANLNKLLTDYTEMKKAILHVYWEEFQKDPVGLMSRVAQPASKKIDQNKLKPEMDEKGNLTTAGFACSQCGQPLFVYKLEQVSEKGKAYTNYFGRCNVAEHEKLILLAQLKPEKDSDEAVTYSLGKFGQRALDFYSIHVTKESTHPVKPLAQIAGNRYASGPVGKALSDACMGTIASFLSKYQDIIIEHQKVVKGNQKRLESLRELAGKENLEYPSVTLPPQPHTKEGVDAYNEVIARVRMWVNLNLWQKLKLSRDDAKPLLRLKGFPSFPLVERQANEVDWWDMVCNVKKLINEKKEDGKVFWQNLAGYKRQEALRPYLSSEEDRKKGKKFARYQLGDLLLHLEKKHGEDWGKVYDEAWERIDKKVEGLSKHIKLEEERRSEDAQSKAALTDWLRAKASFVIEGLKEADKDQEFCRCELKLQKWYGDLRGKPFAIEAENSILDISGFSKQYNCAFIWQKDGVKKLNLYLIINYFKGGKLRFKKIKPEAFEANRFYTVINKKSGEIVPMEVNFNFDDPNLIILPLAFGKRQGREFIWNDLLSLETGSLKLANGRVIEKTLYNRRTRQDEPALFVALTFERREVLDSSNIKPMNLIGVDRGENIPAVIALTDPEGCPLSRFKDSLGNPTHILRIGESYKEKQRTIQAKKEVEQRRAGGYSRKYASKAKNLADDMVRNTARDLLYYAVTQDAMLIFENLSRGFGRQGKRTFMAERQYTRMEDWLTAKLAYEGLPSKTYLSKTLAQYTSKTCSNCGFTITSADYDRVLEKLKKTATGWMTTINGKELKVEGQITYYNRYKRQNVVKDLSVELDRLSEESVNNDISSWTKGRSGEALSLLKKRFSHRPVQEKFVCLNCGFETHADEQAALNIARSWLFLRSQEYKKYQTNKTTGNTDKRAFVETWQSFYRKKLKEVWKPAV

SEQ ID NO: 27010 - protein, 978 aa, Artificial Sequence
  CasX Variant
QEIKRINKIRRRLVKDSNTKKAGKTGPMKTLLVRVMTPDLRERLENLRKKPENIPQPISNTSRANLNKLLTDYTEMKKAILHVYWEEFQKDPVGLMSRVAQPASKKIDQNKLKPEMDEKGNLTTAGFACSQCGQPLFVYKLEQVSEKGKAYTNYFGRCNVAEHEKLILLAQLKPEKDSDEAVTYSLGKFGQRALDFYSIHVTKESTHPVKPLAQIAGNRYASGPVGKALSDACMGTIASFLSKYQDIIIEHQKVVKGNQKRLESLRELAGKENLEYPSVTLPPQPHTKEGVDAYNEVIARVRMWVNLNLWQKLKLSRDDAKPLLRLKGFPSFPLVERQANEVDWWDMVCNVKKLINEKKEDGKVFWQNLAGYKRQEALRPYLSSEEDRKKGKKFARYQLGDLLLHLEKKHGEDWGKVYDEAWERIDKKVEGLSKHIKLEEERRSEDAQSKAALTDWLRAKASFVIEGLKEADKDEKCRCELKLQKWYGDLRGKPFAIEAENSILDISGFSKQYNCAFIWQKDGVKKLNLYLIINYFKGGKLRFKKIKPEAFEANRFYTVINKKSGEIVPMEVNFNFDDPNLIILPLAFGKRQGREFIWNDLLSLETGSLKLANGRVIEKTLYNRRTRQDEPALFVALTFERREVLDSSNIKPMNLIGVDRGENIPAVIALTDPEGCPLSRFKDSLGNPTHILRIGESYKEKQRTIQAKKEVEQRRAGGYSRKYASKAKNLADDMVRNTARDLLYYAVTQDAMLIFENLSRGFGRQGKRTFMAERQYTRMEDWLTAKLAYEGLPSKTYLSKTLAQYTSKTCSNCGFTITSADYDRVLEKLKKTATGWMTTINGKELKVEGQITYYNRYKRQNVVKDLSVELDRLSEESVNNDISSWTKGRSGEALSLLKKRFSHRPVQEKFVCLNCGFETHADEQAALNIARSWLFLRSQEYKKYQTNKTTGNTDKRAFVETWQSFYRKKLKEVWKPAV

SEQ ID NO: 27011 - protein, 978 aa, Artificial Sequence
  CasX Variant
QEIKRINKIRRRLVKDSNTKKAGKTGPMKTLLVRVMTPDLRERLENLRKKPENIPQPISNTSRANLNKLLTDYTEMKKAILHVYWEEFQKDPVGLMSRVAQPASKKIDQNKLKPEMDEKGNLTTAGFACSQCGQPLFVYKLEQVSEKGKAYTNYFGRCNVAEHEKLILLAQLKPEKDSDEAVTYSLGKFGQRALDFYSIHVTKESTHPVKPLAQIAGNRYASGPVGKALSDACMGTIASFLSKYQDIIIEHQKVVKGNQKRLESLRELAGKENLEYPSVTLPPQPHTKEGVDAYNEVIARVRMWVNLNLWQKLKLSRDDAKPLLRLKGFPSFPLVERQANEVDWWDMVCNVKKLINEKKEDGKVFWQNLAGYKRQEALRPYLSSEEDRKKGKKFARYQLGDLLLHLEKKHGEDWGKVYDEAWERIDKKVEGLSKHIKLEEERRSEDAQSKAALTDWLRAKASFVIEGLKEADKDEFCRDELKLQKWYGDLRGKPFAIEAENSILDISGFSKQYNCAFIWQKDGVKKLNLYLIINYFKGGKLRFKKIKPEAFEANRFYTVINKKSGEIVPMEVNFNFDDPNLIILPLAFGKRQGREFIWNDLLSLETGSLKLANGRVIEKTLYNRRTRQDEPALFVALTFERREVLDSSNIKPMNLIGVDRGENIPAVIALTDPEGCPLSRFKDSLGNPTHILRIGESYKEKQRTIQAKKEVEQRRAGGYSRKYASKAKNLADDMVRNTARDLLYYAVTQDAMLIFENLSRGFGRQGKRTFMAERQYTRMEDWLTAKLAYEGLPSKTYLSKTLAQYTSKTCSNCGFTITSADYDRVLEKLKKTATGWMTTINGKELKVEGQITYYNRYKRQNVVKDLSVELDRLSEESVNNDISSWTKGRSGEALSLLKKRFSHRPVQEKFVCLNCGFETHADEQAALNIARSWLFLRSQEYKKYQTNKTTGNTDKRAFVETWQSFYRKKLKEVWKPAV

SEQ ID NO: 27012 - protein, 979 aa, Artificial Sequence
  CasX Variant
QEIKRINKIRRRLVKDSNTKKAGKTGPMKTLLVRVMTPDLRERLENLRKKPENIPQPISNTSRANLNKLLTDYTEMKKAILHVYWEEFQKDPVGLMSRVAQPASKKIDQNKLKPEMDEKGNLTTAGFACSQCGQPLFVYKLEQVSEKGKAYTNYFGRCNVAEHEKLILLAQLKPEKDSDEAVTYSLGKFGQRALDFYSIHVTKESTHPVKPLAQIAGNRYASGPVGKALSDACMGTIASFLSKYQDIIIEHQKVVKGNQKRLESLRELAGKENLEYPSVTLPPQPHTKEGVDAYNEVIARVRMWVNLNLWQKLKLSRDDAKPLLRLKGFPSFPLVERQANEVDWWDMVCNVKKLINEKKEDGKVFWQNLAGYKRQEALRPYLSSEEDRKKGKKFARYQLGDLLLHLEKKHGEDWGKVYDEAWERIDKKVEGLSKHIKLEEERRSEDAQSKAALTDWLRAKASFVIEGLKEADKDEFCRCVELKLQKWYGDLRGKPFAIEAENSILDISGFSKQYNCAFIWQKDGVKKLNLYLIINYFKGGKLRFKKIKPEAFEANRFYTVINKKSGEIVPMEVNFNFDDPNLIILPLAFGKRQGREFIWNDLLSLETGSLKLANGRVIEKTLYNRRTRQDEPALFVALTFERREVLDSSNIKPMNLIGVDRGENIPAVIALTDPEGCPLSRFKDSLGNPTHILRIGESYKEKQRTIQAKKEVEQRRAGGYSRKYASKAKNLADDMVRNTARDLLYYAVTQDAMLIFENLSRGFGRQGKRTFMAERQYTRMEDWLTAKLAYEGLPSKTYLSKTLAQYTSKTCSNCGFTITSADYDRVLEKLKKTATGWMTTINGKELKVEGQITYYNRYKRQNVVKDLSVELDRLSEESVNNDISSWTKGRSGEALSLLKKRFSHRPVQEKFVCLNCGFETHADEQAALNIARSWLFLRSQEYKKYQTNKTTGNTDKRAFVETWQSFYRKKLKEVWKPAV

SEQ ID NO: 27013 - protein, 978 aa, Artificial Sequence
  CasX Variant
QEIKRINKIRRRLVKDSNTKKAGKTGPMKTLLVRVMTPDLRERLENLRKKPENIPQPISNTSRANLNKLLTDYTEMKKAILHVYWEEFQKDPVGLMSRVAQPASKKIDQNKLKPEMDEKGNLTTAGFACSQCGQPLFVYKLEQVSEKGKAYTNYFGRCNVAEHEKLILLAQLKPEKDSDEAVTYSLGKFGQRALDFYSIHVTKESTHPVKPLAQIAGNRYASGPVGKALSDACMGTIASFLSKYQDIIIEHQKVVKGNQKRLESLRELAGKENLEYPSVTLPPQPHTKEGVDAYNEVIARVRMWVNLNLWQKLKLSRDDAKPLLRLKGFPSFPLVERQANEVDWWDMVCNVKKLINEKKEDGKVFWQNLAGYKRQEALRPYLSSEEDRKKGKKFARYQLGDLLLHLEKKHGEDWGKVYDEAWERIDKKVEGLSKHIKLEEERRSEDAQSKAALTDWLRAKASFVIEGLKEADKDEFCRCDLKLQKWYGDLRGKPFAIEAENSILDISGFSKQYNCAFIWQKDGVKKLNLYLIINYFKGGKLRFKKIKPEAFEANRFYTVINKKSGEIVPMEVNFNFDDPNLIILPLAFGKRQGREFIWNDLLSLETGSLKLANGRVIEKTLYNRRTRQDEPALFVALTFERREVLDSSNIKPMNLIGVDRGENIPAVIALTDPEGCPLSRFKDSLGNPTHILRIGESYKEKQRTIQAKKEVEQRRAGGYSRKYASKAKNLADDMVRNTARDLLYYAVTQDAMLIFENLSRGFGRQGKRTFMAERQYTRMEDWLTAKLAYEGLPSKTYLSKTLAQYTSKTCSNCGFTITSADYDRVLEKLKKTATGWMTTINGKELKVEGQITYYNRYKRQNVVKDLSVELDRLSEESVNNDISSWTKGRSGEALSLLKKRFSHRPVQEKFVCLNCGFETHADEQAALNIARSWLFLRSQEYKKYQTNKTTGNTDKRAFVETWQSFYRKKLKEVWKPAV

SEQ ID NO: 27014 - protein, 978 aa, Artificial Sequence
  CasX Variant
QEIKRINKIRRRLVKDSNTKKAGKTGPMKTLLVRVMTPDLRERLENLRKKPENIPQPISNTSRANLNKLLTDYTEMKKAILHVYWEEFQKDPVGLMSRVAQPASKKIDQNKLKPEMDEKGNLTTAGFACSQCGQPLFVYKLEQVSEKGKAYTNYFGRCNVAEHEKLILLAQLKPEKDSDEAVTYSLGKFGQRALDFYSIHVTKESTHPVKPLAQIAGNRYASGPVGKALSDACMGTIASFLSKYQDIIIEHQKVVKGNQKRLESLRELAGKENLEYPSVTLPPQPHTKEGVDAYNEVIARVRMWVNLNLWQKLKLSRDDAKPLLRLKGFPSFPLVERQANEVDWWDMVCNVKKLINEKKEDGKVFWQNLAGYKRQEALRPYLSSEEDRKKGKKFARYQLGDLLLHLEKKHGEDWGKVYDEAWERIDKKVEGLSKHIKLEEERRSEDAQSKAALTDWLRAKASFVIEGLKEADKDEFCRCERKLQKWYGDLRGKPFAIEAENSILDISGFSKQYNCAFIWQKDGVKKLNLYLIINYFKGGKLRFKKIKPEAFEANRFYTVINKKSGEIVPMEVNFNFDDPNLIILPLAFGKRQGREFIWNDLLSLETGSLKLANGRVIEKTLYNRRTRQDEPALFVALTFERREVLDSSNIKPMNLIGVDRGENIPAVIALTDPEGCPLSRFKDSLGNPTHILRIGESYKEKQRTIQAKKEVEQRRAGGYSRKYASKAKNLADDMVRNTARDLLYYAVTQDAMLIFENLSRGFGRQGKRTFMAERQYTRMEDWLTAKLAYEGLPSKTYLSKTLAQYTSKTCSNCGFTITSADYDRVLEKLKKTATGWMTTINGKELKVEGQITYYNRYKRQNVVKDLSVELDRLSEESVNNDISSWTKGRSGEALSLLKKRFSHRPVQEKFVCLNCGFETHADEQAALNIARSWLFLRSQEYKKYQTNKTTGNTDKRAFVETWQSFYRKKLKEVWKPAV

SEQ ID NO: 27015 - protein, 978 aa, Artificial Sequence
  CasX Variant
QEIKRINKIRRRLVKDSNTKKAGKTGPMKTLLVRVMTPDLRERLENLRKKPENIPQPISNTSRANLNKLLTDYTEMKKAILHVYWEEFQKDPVGLMSRVAQPASKKIDQNKLKPEMDEKGNLTTAGFACSQCGQPLFVYKLEQVSEKGKAYTNYFGRCNVAEHEKLILLAQLKPEKDSDEAVTYSLGKFGQRALDFYSIHVTKESTHPVKPLAQIAGNRYASGPVGKALSDACMGTIASFLSKYQDIIIEHQKVVKGNQKRLESLRELAGKENLEYPSVTLPPQPHTKEGVDAYNEVIARVRMWVNLNLWQKLKLSRDDAKPLLRLKGFPSFPLVERQANEVDWWDMVCNVKKLINEKKEDGKVFWQNLAGYKRQEALRPYLSSEEDRKKGKKFARYQLGDLLLHLEKKHGEDWGKVYDEAWERIDKKVEGLSKHIKLEEERRSEDAQSKAALTDWLRAKASFVIEGLKEADKDEFCRCELKHQKWYGDLRGKPFAIEAENSILDISGFSKQYNCAFIWQKDGVKKLNLYLIINYFKGGKLRFKKIKPEAFEANRFYTVINKKSGEIVPMEVNFNFDDPNLIILPLAFGKRQGREFIWNDLLSLETGSLKLANGRVIEKTLYNRRTRQDEPALFVALTFERREVLDSSNIKPMNLIGVDRGENIPAVIALTDPEGCPLSRFKDSLGNPTHILRIGESYKEKQRTIQAKKEVEQRRAGGYSRKYASKAKNLADDMVRNTARDLLYYAVTQDAMLIFENLSRGFGRQGKRTFMAERQYTRMEDWLTAKLAYEGLPSKTYLSKTLAQYTSKTCSNCGFTITSADYDRVLEKLKKTATGWMTTINGKELKVEGQITYYNRYKRQNVVKDLSVELDRLSEESVNNDISSWTKGRSGEALSLLKKRFSHRPVQEKFVCLNCGFETHADEQAALNIARSWLFLRSQEYKKYQTNKTTGNTDKRAFVETWQSFYRKKLKEVWKPAV

SEQ ID NO: 27016 - protein, 978 aa, Artificial Sequence
  CasX Variant
QEIKRINKIRRRLVKDSNTKKAGKTGPMKTLLVRVMTPDLRERLENLRKKPENIPQPISNTSRANLNKLLTDYTEMKKAILHVYWEEFQKDPVGLMSRVAQPASKKIDQNKLKPEMDEKGNLTTAGFACSQCGQPLFVYKLEQVSEKGKAYTNYFGRCNVAEHEKLILLAQLKPEKDSDEAVTYSLGKFGQRALDFYSIHVTKESTHPVKPLAQIAGNRYASGPVGKALSDACMGTIASFLSKYQDIIIEHQKVVKGNQKRLESLRELAGKENLEYPSVTLPPQPHTKEGVDAYNEVIARVRMWVNLNLWQKLKLSRDDAKPLLRLKGFPSFPLVERQANEVDWWDMVCNVKKLINEKKEDGKVFWQNLAGYKRQEALRPYLSSEEDRKKGKKFARYQLGDLLLHLEKKHGEDWGKVYDEAWERIDKKVEGLSKHIKLEEERRSEDAQSKAALTDWLRAKASFVIEGLKEADKDEFCRCELKLQPWYGDLRGKPFAIEAENSILDISGFSKQYNCAFIWQKDGVKKLNLYLIINYFKGGKLRFKKIKPEAFEANRFYTVINKKSGEIVPMEVNFNFDDPNLIILPLAFGKRQGREFIWNDLLSLETGSLKLANGRVIEKTLYNRRTRQDEPALFVALTFERREVLDSSNIKPMNLIGVDRGENIPAVIALTDPEGCPLSRFKDSLGNPTHILRIGESYKEKQRTIQAKKEVEQRRAGGYSRKYASKAKNLADDMVRNTARDLLYYAVTQDAMLIFENLSRGFGRQGKRTFMAERQYTRMEDWLTAKLAYEGLPSKTYLSKTLAQYTSKTCSNCGFTITSADYDRVLEKLKKTATGWMTTINGKELKVEGQITYYNRYKRQNVVKDLSVELDRLSEESVNNDISSWTKGRSGEALSLLKKRFSHRPVQEKFVCLNCGFETHADEQAALNIARSWLFLRSQEYKKYQTNKTTGNTDKRAFVETWQSFYRKKLKEVWKPAV

SEQ ID NO: 27017 - protein, 978 aa, Artificial Sequence; identical to SEQ ID NO: 26929
  CasX Variant

SEQ ID NO: 27018 - protein, 978 aa, Artificial Sequence
  CasX Variant
QEIKRINKIRRRLVKDSNTKKAGKTGPMKTLLVRVMTPDLRERLENLRKKPENIPQPISNTSRANLNKLLTDYTEMKKAILHVYWEEFQKDPVGLMSRVAQPASKKIDQNKLKPEMDEKGNLTTAGFACSQCGQPLFVYKLEQVSEKGKAYTNYFGRCNVAEHEKLILLAQLKPEKDSDEAVTYSLGKFGQRALDFYSIHVTKESTHPVKPLAQIAGNRYASGPVGKALSDACMGTIASFLSKYQDIIIEHQKVVKGNQKRLESLRELAGKENLEYPSVTLPPQPHTKEGVDAYNEVIARVRMWVNLNLWQKLKLSRDDAKPLLRLKGFPSFPLVERQANEVDWWDMVCNVKKLINEKKEDGKVFWQNLAGYKRQEALRPYLSSEEDRKKGKKFARYQLGDLLLHLEKKHGEDWGKVYDEAWERIDKKVEGLSKHIKLEEERRSEDAQSKAALTDWLRAKASFVIEGLKEADKDEFCRCELKLQKWYGDLRGKPFAIEAENSILDISGFSKQYNCAFIWQKDGVKKLNLYLIINYFKGGKLRFKKIKPEAFEANRFYTVINKKSGEIVPMEVNFNFDDPNLIILPLAFGKRFGREFIWNDLLSLETGSLKLANGRVIEKTLYNRRTRQDEPALFVALTFERREVLDSSNIKPMNLIGVDRGENIPAVIALTDPEGCPLSRFKDSLGNPTHILRIGESYKEKQRTIQAKKEVEQRRAGGYSRKYASKAKNLADDMVRNTARDLLYYAVTQDAMLIFENLSRGFGRQGKRTFMAERQYTRMEDWLTAKLAYEGLPSKTYLSKTLAQYTSKTCSNCGFTITSADYDRVLEKLKKTATGWMTTINGKELKVEGQITYYNRYKRQNVVKDLSVELDRLSEESVNNDISSWTKGRSGEALSLLKKRFSHRPVQEKFVCLNCGFETHADEQAALNIARSWLFLRSQEYKKYQTNKTTGNTDKRAFVETWQSFYRKKLKEVWKPAV

SEQ ID NO: 27019 - protein, 978 aa, Artificial Sequence
  CasX Variant
QEIKRINKIRRRLVKDSNTKKAGKTGPMKTLLVRVMTPDLRERLENLRKKPENIPQPISNTSRANLNKLLTDYTEMKKAILHVYWEEFQKDPVGLMSRVAQPASKKIDQNKLKPEMDEKGNLTTAGFACSQCGQPLFVYKLEQVSEKGKAYTNYFGRCNVAEHEKLILLAQLKPEKDSDEAVTYSLGKFGQRALDFYSIHVTKESTHPVKPLAQIAGNRYASGPVGKALSDACMGTIASFLSKYQDIIIEHQKVVKGNQKRLESLRELAGKENLEYPSVTLPPQPHTKEGVDAYNEVIARVRMWVNLNLWQKLKLSRDDAKPLLRLKGFPSFPLVERQANEVDWWDMVCNVKKLINEKKEDGKVFWQNLAGYKRQEALRPYLSSEEDRKKGKKFARYQLGDLLLHLEKKHGEDWGKVYDEAWERIDKKVEGLSKHIKLEEERRSEDAQSKAALTDWLRAKASFVIEGLKEADKDEFCRCELKLQKWYGDLRGKPFAIEAENSILDISGFSKQYNCAFIWQKDGVKKLNLYLIINYFKGGKLRFKKIKPEAFEANRFYTVINKKSGEIVPMEVNFNFDDPNLIILPLAFGKRVGREFIWNDLLSLETGSLKLANGRVIEKTLYNRRTRQDEPALFVALTFERREVLDSSNIKPMNLIGVDRGENIPAVIALTDPEGCPLSRFKDSLGNPTHILRIGESYKEKQRTIQAKKEVEQRRAGGYSRKYASKAKNLADDMVRNTARDLLYYAVTQDAMLIFENLSRGFGRQGKRTFMAERQYTRMEDWLTAKLAYEGLPSKTYLSKTLAQYTSKTCSNCGFTITSADYDRVLEKLKKTATGWMTTINGKELKVEGQITYYNRYKRQNVVKDLSVELDRLSEESVNNDISSWTKGRSGEALSLLKKRFSHRPVQEKFVCLNCGFETHADEQAALNIARSWLFLRSQEYKKYQTNKTTGNTDKRAFVETWQSFYRKKLKEVWKPAV

SEQ ID NO: 27020 - protein, 979 aa, Artificial Sequence
  CasX Variant
QEIKRINKIRRRLVKDSNTKKAGKTGPMKTLLVRVMTPDLRERLENLRKKPENIPQPISNTSRANLNKLLTDYTEMKKAILHVYWEEFQKDPVGLMSRVAQPASKKIDQNKLKPEMDEKGNLTTAGFACSQCGQPLFVYKLEQVSEKGKAYTNYFGRCNVAEHEKLILLAQLKPEKDSDEAVTYSLGKFGQRALDFYSIHVTKESTHPVKPLAQIAGNRYASGPVGKALSDACMGTIASFLSKYQDIIIEHQKVVKGNQKRLESLRELAGKENLEYPSVTLPPQPHTKEGVDAYNEVIARVRMWVNLNLWQKLKLSRDDAKPLLRLKGFPSFPLVERQANEVDWWDMVCNVKKLINEKKEDGKVFWQNLAGYKRQEALRPYLSSEEDRKKGKKFARYQLGDLLLHLEKKHGEDWGKVYDEAWERIDKKVEGLSKHIKLEEERRSEDAQSKAALTDWLRAKASFVIEGLKEADKDEFCRCELKLQKWYGDLRGKPFAIEAENSILDISGFSKQYNCAFIWQKDGVKKLNLYLIINYFKGGKLRFKKIKPEAFEANRFYTVINKKSGEIVPMEVNFNFDDPNLIILPLAFGKRQGREFIWNDLLSLETGSLKLANGRVIEKTLYNRRTRQDEPALFVALTFERREVLDSSNIIKPMNLIGVDRGENIPAVIALTDPEGCPLSRFKDSLGNPTHILRIGESYKEKQRTIQAKKEVEQRRAGGYSRKYASKAKNLADDMVRNTARDLLYYAVTQDAMLIFENLSRGFGRQGKRTFMAERQYTRMEDWLTAKLAYEGLPSKTYLSKTLAQYTSKTCSNCGFTITSADYDRVLEKLKKTATGWMTTINGKELKVEGQITYYNRYKRQNVVKDLSVELDRLSEESVNNDISSWTKGRSGEALSLLKKRFSHRPVQEKFVCLNCGFETHADEQAALNIARSWLFLRSQEYKKYQTNKTTGNTDKRAFVETWQSFYRKKLKEVWKPAV

SEQ ID NO: 27021 - protein, 979 aa, Artificial Sequence
  CasX Variant
QEIKRINKIRRRLVKDSNTKKAGKTGPMKTLLVRVMTPDLRERLENLRKKPENIPQPISNTSRANLNKLLTDYTEMKKAILHVYWEEFQKDPVGLMSRVAQPASKKIDQNKLKPEMDEKGNLTTAGFACSQCGQPLFVYKLEQVSEKGKAYTNYFGRCNVAEHEKLILLAQLKPEKDSDEAVTYSLGKFGQRALDFYSIHVTKESTHPVKPLAQIAGNRYASGPVGKALSDACMGTIASFLSKYQDIIIEHQKVVKGNQKRLESLRELAGKENLEYPSVTLPPQPHTKEGVDAYNEVIARVRMWVNLNLWQKLKLSRDDAKPLLRLKGFPSFPLVERQANEVDWWDMVCNVKKLINEKKEDGKVFWQNLAGYKRQEALRPYLSSEEDRKKGKKFARYQLGDLLLHLEKKHGEDWGKVYDEAWERIDKKVEGLSKHIKLEEERRSEDAQSKAALTDWLRAKASFVIEGLKEADKDEFCRCELKLQKWYGDLRGKPFAIEAENSILDISGFSKQYNCAFIWQKDGVKKLNLYLIINYFKGGKLRFKKIKPEAFEANRFYTVINKKSGEIVPMEVNFNFDDPNLIILPLAFGKRQGREFIWNDLLSLETGSLKLANGRVIEKTLYNRRTRQDEPALFVALTFERREVLDSSNIKTPMNLIGVDRGENIPAVIALTDPEGCPLSRFKDSLGNPTHILRIGESYKEKQRTIQAKKEVEQRRAGGYSRKYASKAKNLADDMVRNTARDLLYYAVTQDAMLIFENLSRGFGRQGKRTFMAERQYTRMEDWLTAKLAYEGLPSKTYLSKTLAQYTSKTCSNCGFTITSADYDRVLEKLKKTATGWMTTINGKELKVEGQITYYNRYKRQNVVKDLSVELDRLSEESVNNDISSWTKGRSGEALSLLKKRFSHRPVQEKFVCLNCGFETHADEQAALNIARSWLFLRSQEYKKYQTNKTTGNTDKRAFVETWQSFYRKKLKEVWKPAV

SEQ ID NO: 27022 - protein, 979 aa, Artificial Sequence
  CasX Variant
QEIKRINKIRRRLVKDSNTKKAGKTGPMKTLLVRVMTPDLRERLENLRKKPENIPQPISNTSRANLNKLLTDYTEMKKAILHVYWEEFQKDPVGLMSRVAQPASKKIDQNKLKPEMDEKGNLTTAGFACSQCGQPLFVYKLEQVSEKGKAYTNYFGRCNVAEHEKLILLAQLKPEKDSDEAVTYSLGKFGQRALDFYSIHVTKESTHPVKPLAQIAGNRYASGPVGKALSDACMGTIASFLSKYQDIIIEHQKVVKGNQKRLESLRELAGKENLEYPSVTLPPQPHTKEGVDAYNEVIARVRMWVNLNLWQKLKLSRDDAKPLLRLKGFPSFPLVERQANEVDWWDMVCNVKKLINEKKEDGKVFWQNLAGYKRQEALRPYLSSEEDRKKGKKFARYQLGDLLLHLEKKHGEDWGKVYDEAWERIDKKVEGLSKHIKLEEERRSEDAQSKAALTDWLRAKASFVIEGLKEADKDEFCRCELKLQKWYGDLRGKPFAIEAENSILDISGFSKQYNCAFIWQKDGVKKLNLYLIINYFKGGKLRFKKIKPEAFEANRFYTVINKKSGEIVPMEVNFNFDDPNLIILPLAFGKRQGREFIWNDLLSLETGSLKLANGRVIEKTLYNRRTRQDEPALFVALTFERREVLDSSNIKNPMNLIGVDRGENIPAVIALTDPEGCPLSRFKDSLGNPTHILRIGESYKEKQRTIQAKKEVEQRRAGGYSRKYASKAKNLADDMVRNTARDLLYYAVTQDAMLIFENLSRGFGRQGKRTFMAERQYTRMEDWLTAKLAYEGLPSKTYLSKTLAQYTSKTCSNCGFTITSADYDRVLEKLKKTATGWMTTINGKELKVEGQITYYNRYKRQNVVKDLSVELDRLSEESVNNDISSWTKGRSGEALSLLKKRFSHRPVQEKFVCLNCGFETHADEQAALNIARSWLFLRSQEYKKYQTNKTTGNTDKRAFVETWQSFYRKKLKEVWKPAV

SEQ ID NO: 27023 - protein, 979 aa, Artificial Sequence
  CasX Variant
QEIKRINKIRRRLVKDSNTKKAGKTGPMKTLLVRVMTPDLRERLENLRKKPENIPQPISNTSRANLNKLLTDYTEMKKAILHVYWEEFQKDPVGLMSRVAQPASKKIDQNKLKPEMDEKGNLTTAGFACSQCGQPLFVYKLEQVSEKGKAYTNYFGRCNVAEHEKLILLAQLKPEKDSDEAVTYSLGKFGQRALDFYSIHVTKESTHPVKPLAQIAGNRYASGPVGKALSDACMGTIASFLSKYQDIIIEHQKVVKGNQKRLESLRELAGKENLEYPSVTLPPQPHTKEGVDAYNEVIARVRMWVNLNLWQKLKLSRDDAKPLLRLKGFPSFPLVERQANEVDWWDMVCNVKKLINEKKEDGKVFWQNLAGYKRQEALRPYLSSEEDRKKGKKFARYQLGDLLLHLEKKHGEDWGKVYDEAWERIDKKVEGLSKHIKLEEERRSEDAQSKAALTDWLRAKASFVIEGLKEADKDEFCRCELKLQKWYGDLRGKPFAIEAENSILDISGFSKQYNCAFIWQKDGVKKLNLYLIINYFKGGKLRFKKIKPEAFEANRFYTVINKKSGEIVPMEVNFNFDDPNLIILPLAFGKRQGREFIWNDLLSLETGSLKLANGRVIEKTLYNRRTRQDEPALFVALTFERREVLDSSNIKPRMNLIGVDRGENIPAVIALTDPEGCPLSRFKDSLGNPTHILRIGESYKEKQRTIQAKKEVEQRRAGGYSRKYASKAKNLADDMVRNTARDLLYYAVTQDAMLIFENLSRGFGRQGKRTFMAERQYTRMEDWLTAKLAYEGLPSKTYLSKTLAQYTSKTCSNCGFTITSADYDRVLEKLKKTATGWMTTINGKELKVEGQITYYNRYKRQNVVKDLSVELDRLSEESVNNDISSWTKGRSGEALSLLKKRFSHRPVQEKFVCLNCGFETHADEQAALNIARSWLFLRSQEYKKYQTNKTTGNTDKRAFVETWQSFYRKKLKEVWKPAV

SEQ ID NO: 27024 - protein, 979 aa, Artificial Sequence
  CasX Variant
QEIKRINKIRRRLVKDSNTKKAGKTGPMKTLLVRVMTPDLRERLENLRKKPENIPQPISNTSRANLNKLLTDYTEMKKAILHVYWEEFQKDPVGLMSRVAQPASKKIDQNKLKPEMDEKGNLTTAGFACSQCGQPLFVYKLEQVSEKGKAYTNYFGRCNVAEHEKLILLAQLKPEKDSDEAVTYSLGKFGQRALDFYSIHVTKESTHPVKPLAQIAGNRYASGPVGKALSDACMGTIASFLSKYQDIIIEHQKVVKGNQKRLESLRELAGKENLEYPSVTLPPQPHTKEGVDAYNEVIARVRMWVNLNLWQKLKLSRDDAKPLLRLKGFPSFPLVERQANEVDWWDMVCNVKKLINEKKEDGKVFWQNLAGYKRQEALRPYLSSEEDRKKGKKFARYQLGDLLLHLEKKHGEDWGKVYDEAWERIDKKVEGLSKHIKLEEERRSEDAQSKAALTDWLRAKASFVIEGLKEADKDEFCRCELKLQKWYGDLRGKPFAIEAENSILDISGFSKQYNCAFIWQKDGVKKLNLYLIINYFKGGKLRFKKIKPEAFEANRFYTVINKKSGEIVPMEVNFNFDDPNLIILPLAFGKRQGREFIWNDLLSLETGSLKLANGRVIEKTLYNRRTRQDEPALFVALTFERREVLDSSNIKPMSNLIGVDRGENIPAVIALTDPEGCPLSRFKDSLGNPTHILRIGESYKEKQRTIQAKKEVEQRRAGGYSRKYASKAKNLADDMVRNTARDLLYYAVTQDAMLIFENLSRGFGRQGKRTFMAERQYTRMEDWLTAKLAYEGLPSKTYLSKTLAQYTSKTCSNCGFTITSADYDRVLEKLKKTATGWMTTINGKELKVEGQITYYNRYKRQNVVKDLSVELDRLSEESVNNDISSWTKGRSGEALSLLKKRFSHRPVQEKFVCLNCGFETHADEQAALNIARSWLFLRSQEYKKYQTNKTTGNTDKRAFVETWQSFYRKKLKEVWKPAV

SEQ ID NO: 27025 - protein, 978 aa, Artificial Sequence
  CasX Variant
QEIKRINKIRRRLVKDSNTKKAGKTGPMKTLLVRVMTPDLRERLENLRKKPENIPQPISNTSRANLNKLLTDYTEMKKAILHVYWEEFQKDPVGLMSRVAQPASKKIDQNKLKPEMDEKGNLTTAGFACSQCGQPLFVYKLEQVSEKGKAYTNYFGRCNVAEHEKLILLAQLKPEKDSDEAVTYSLGKFGQRALDFYSIHVTKESTHPVKPLAQIAGNRYASGPVGKALSDACMGTIASFLSKYQDIIIEHQKVVKGNQKRLESLRELAGKENLEYPSVTLPPQPHTKEGVDAYNEVIARVRMWVNLNLWQKLKLSRDDAKPLLRLKGFPSFPLVERQANEVDWWDMVCNVKKLINEKKEDGKVFWQNLAGYKRQEALRPYLSSEEDRKKGKKFARYQLGDLLLHLEKKHGEDWGKVYDEAWERIDKKVEGLSKHIKLEEERRSEDAQSKAALTDWLRAKASFVIEGLKEADKDEFCRCELKLQKWYGDLRGKPFAIEAENSILDISGFSKQYNCAFIWQKDGVKKLNLYLIINYFKGGKLRFKKIKPEAFEANRFYTVINKKSGEIVPMEVNFNFDDPNLIILPLAFGKRQGREFIWNDLLSLETGSLKLANGRVIEKTLYNRRTRQDEPALFVALTFERREVLDSSNIKPMNLIGVDRGENIPAVIALTDPEGCPLSRFKDSLGNPTHILRIWESYKEKQRTIQAKKEVEQRRAGGYSRKYASKAKNLADDMVRNTARDLLYYAVTQDAMLIFENLSRGFGRQGKRTFMAERQYTRMEDWLTAKLAYEGLPSKTYLSKTLAQYTSKTCSNCGFTITSADYDRVLEKLKKTATGWMTTINGKELKVEGQITYYNRYKRQNVVKDLSVELDRLSEESVNNDISSWTKGRSGEALSLLKKRFSHRPVQEKFVCLNCGFETHADEQAALNIARSWLFLRSQEYKKYQTNKTTGNTDKRAFVETWQSFYRKKLKEVWKPAV

SEQ ID NO: 27026 - protein, 978 aa, Artificial Sequence
  CasX Variant
QEIKRINKIRRRLVKDSNTKKAGKTGPMKTLLVRVMTPDLRERLENLRKKPENIPQPISNTSRANLNKLLTDYTEMKKAILHVYWEEFQKDPVGLMSRVAQPASKKIDQNKLKPEMDEKGNLTTAGFACSQCGQPLFVYKLEQVSEKGKAYTNYFGRCNVAEHEKLILLAQLKPEKDSDEAVTYSLGKFGQRALDFYSIHVTKESTHPVKPLAQIAGNRYASGPVGKALSDACMGTIASFLSKYQDIIIEHQKVVKGNQKRLESLRELAGKENLEYPSVTLPPQPHTKEGVDAYNEVIARVRMWVNLNLWQKLKLSRDDAKPLLRLKGFPSFPLVERQANEVDWWDMVCNVKKLINEKKEDGKVFWQNLAGYKRQEALRPYLSSEEDRKKGKKFARYQLGDLLLHLEKKHGEDWGKVYDEAWERIDKKVEGLSKHIKLEEERRSEDAQSKAALTDWLRAKASFVIEGLKEADKDEFCRCELKLQKWYGDLRGKPFAIEAENSILDISGFSKQYNCAFIWQKDGVKKLNLYLIINYFKGGKLRFKKIKPEAFEANRFYTVINKKSGEIVPMEVNFNFDDPNLIILPLAFGKRQGREFIWNDLLSLETGSLKLANGRVIEKTLYNRRTRQDEPALFVALTFERREVLDSSNIKPMNLIGVDRGENIPAVIALTDPEGCPLSRFKDSLGNPTHILRIRESYKEKQRTIQAKKEVEQRRAGGYSRKYASKAKNLADDMVRNTARDLLYYAVTQDAMLIFENLSRGFGRQGKRTFMAERQYTRMEDWLTAKLAYEGLPSKTYLSKTLAQYTSKTCSNCGFTITSADYDRVLEKLKKTATGWMTTINGKELKVEGQITYYNRYKRQNVVKDLSVELDRLSEESVNNDISSWTKGRSGEALSLLKKRFSHRPVQEKFVCLNCGFETHADEQAALNIARSWLFLRSQEYKKYQTNKTTGNTDKRAFVETWQSFYRKKLKEVWKPAV

SEQ ID NO: 27027 - protein, 978 aa, Artificial Sequence
  CasX Variant
QEIKRINKIRRRLVKDSNTKKAGKTGPMKTLLVRVMTPDLRERLENLRKKPENIPQPISNTSRANLNKLLTDYTEMKKAILHVYWEEFQKDPVGLMSRVAQPASKKIDQNKLKPEMDEKGNLTTAGFACSQCGQPLFVYKLEQVSEKGKAYTNYFGRCNVAEHEKLILLAQLKPEKDSDEAVTYSLGKFGQRALDFYSIHVTKESTHPVKPLAQIAGNRYASGPVGKALSDACMGTIASFLSKYQDIIIEHQKVVKGNQKRLESLRELAGKENLEYPSVTLPPQPHTKEGVDAYNEVIARVRMWVNLNLWQKLKLSRDDAKPLLRLKGFPSFPLVERQANEVDWWDMVCNVKKLINEKKEDGKVFWQNLAGYKRQEALRPYLSSEEDRKKGKKFARYQLGDLLLHLEKKHGEDWGKVYDEAWERIDKKVEGLSKHIKLEEERRSEDAQSKAALTDWLRAKASFVIEGLKEADKDEFCRCELKLQKWYGDLRGKPFAIEAENSILDISGFSKQYNCAFIWQKDGVKKLNLYLIINYFKGGKLRFKKIKPEAFEANRFYTVINKKSGEIVPMEVNFNFDDPNLIILPLAFGKRQGREFIWNDLLSLETGSLKLANGRVIEKTLYNRRTRQDEPALFVALTFERREVLDSSNIKPMNLIGVDRGENIPAVIALTDPEGCPLSRFKDSLGNPTHILRIGESYKEKQRTIQASKEVEQRRAGGYSRKYASKAKNLADDMVRNTARDLLYYAVTQDAMLIFENLSRGFGRQGKRTFMAERQYTRMEDWLTAKLAYEGLPSKTYLSKTLAQYTSKTCSNCGFTITSADYDRVLEKLKKTATGWMTTINGKELKVEGQITYYNRYKRQNVVKDLSVELDRLSEESVNNDISSWTKGRSGEALSLLKKRFSHRPVQEKFVCLNCGFETHADEQAALNIARSWLFLRSQEYKKYQTNKTTGNTDKRAFVETWQSFYRKKLKEVWKPAV

SEQ ID NO: 27028 - protein, 978 aa, Artificial Sequence
  CasX Variant
QEIKRINKIRRRLVKDSNTKKAGKTGPMKTLLVRVMTPDLRERLENLRKKPENIPQPISNTSRANLNKLLTDYTEMKKAILHVYWEEFQKDPVGLMSRVAQPASKKIDQNKLKPEMDEKGNLTTAGFACSQCGQPLFVYKLEQVSEKGKAYTNYFGRCNVAEHEKLILLAQLKPEKDSDEAVTYSLGKFGQRALDFYSIHVTKESTHPVKPLAQIAGNRYASGPVGKALSDACMGTIASFLSKYQDIIIEHQKVVKGNQKRLESLRELAGKENLEYPSVTLPPQPHTKEGVDAYNEVIARVRMWVNLNLWQKLKLSRDDAKPLLRLKGFPSFPLVERQANEVDWWDMVCNVKKLINEKKEDGKVFWQNLAGYKRQEALRPYLSSEEDRKKGKKFARYQLGDLLLHLEKKHGEDWGKVYDEAWERIDKKVEGLSKHIKLEEERRSEDAQSKAALTDWLRAKASFVIEGLKEADKDEFCRCELKLQKWYGDLRGKPFAIEAENSILDISGFSKQYNCAFIWQKDGVKKLNLYLIINYFKGGKLRFKKIKPEAFEANRFYTVINKKSGEIVPMEVNFNFDDPNLIILPLAFGKRQGREFIWNDLLSLETGSLKLANGRVIEKTLYNRRTRQDEPALFVALTFERREVLDSSNIKPMNLIGVDRGENIPAVIALTDPEGCPLSRFKDSLGNPTHILRIGESYKEKQRTIQAKKEVEQRRAGGYSRKYASKAKNLADDMVHNTARDLLYYAVTQDAMLIFENLSRGFGRQGKRTFMAERQYTRMEDWLTAKLAYEGLPSKTYLSKTLAQYTSKTCSNCGFTITSADYDRVLEKLKKTATGWMTTINGKELKVEGQITYYNRYKRQNVVKDLSVELDRLSEESVNNDISSWTKGRSGEALSLLKKRFSHRPVQEKFVCLNCGFETHADEQAALNIARSWLFLRSQEYKKYQTNKTTGNTDKRAFVETWQSFYRKKLKEVWKPAV

SEQ ID NO: 27029 - protein, 978 aa, Artificial Sequence
  CasX Variant
QEIKRINKIRRRLVKDSNTKKAGKTGPMKTLLVRVMTPDLRERLENLRKKPENIPQPISNTSRANLNKLLTDYTEMKKAILHVYWEEFQKDPVGLMSRVAQPASKKIDQNKLKPEMDEKGNLTTAGFACSQCGQPLFVYKLEQVSEKGKAYTNYFGRCNVAEHEKLILLAQLKPEKDSDEAVTYSLGKFGQRALDFYSIHVTKESTHPVKPLAQIAGNRYASGPVGKALSDACMGTIASFLSKYQDIIIEHQKVVKGNQKRLESLRELAGKENLEYPSVTLPPQPHTKEGVDAYNEVIARVRMWVNLNLWQKLKLSRDDAKPLLRLKGFPSFPLVERQANEVDWWDMVCNVKKLINEKKEDGKVFWQNLAGYKRQEALRPYLSSEEDRKKGKKFARYQLGDLLLHLEKKHGEDWGKVYDEAWERIDKKVEGLSKHIKLEEERRSEDAQSKAALTDWLRAKASFVIEGLKEADKDEFCRCELKLQKWYGDLRGKPFAIEAENSILDISGFSKQYNCAFIWQKDGVKKLNLYLIINYFKGGKLRFKKIKPEAFEANRFYTVINKKSGEIVPMEVNFNFDDPNLIILPLAFGKRQGREFIWNDLLSLETGSLKLANGRVIEKTLYNRRTRQDEPALFVALTFERREVLDSSNIKPMNLIGVDRGENIPAVIALTDPEGCPLSRFKDSLGNPTHILRIGESYKEKQRTIQAKKEVEQRRAGGYSRKYASKAKNLADDMVRNTARDLLYYAVTQDAMLIFENLSRGFGRQGKRTFSAERQYTRMEDWLTAKLAYEGLPSKTYLSKTLAQYTSKTCSNCGFTITSADYDRVLEKLKKTATGWMTTINGKELKVEGQITYYNRYKRQNVVKDLSVELDRLSEESVNNDISSWTKGRSGEALSLLKKRFSHRPVQEKFVCLNCGFETHADEQAALNIARSWLFLRSQEYKKYQTNKTTGNTDKRAFVETWQSFYRKKLKEVWKPAV

SEQ ID NO: 27030 - protein, 978 aa, Artificial Sequence
  CasX Variant
QEIKRINKIRRRLVKDSNTKKAGKTGPMKTLLVRVMTPDLRERLENLRKKPENIPQPISNTSRANLNKLLTDYTEMKKAILHVYWEEFQKDPVGLMSRVAQPASKKIDQNKLKPEMDEKGNLTTAGFACSQCGQPLFVYKLEQVSEKGKAYTNYFGRCNVAEHEKLILLAQLKPEKDSDEAVTYSLGKFGQRALDFYSIHVTKESTHPVKPLAQIAGNRYASGPVGKALSDACMGTIASFLSKYQDIIIEHQKVVKGNQKRLESLRELAGKENLEYPSVTLPPQPHTKEGVDAYNEVIARVRMWVNLNLWQKLKLSRDDAKPLLRLKGFPSFPLVERQANEVDWWDMVCNVKKLINEKKEDGKVFWQNLAGYKRQEALRPYLSSEEDRKKGKKFARYQLGDLLLHLEKKHGEDWGKVYDEAWERIDKKVEGLSKHIKLEEERRSEDAQSKAALTDWLRAKASFVIEGLKEADKDEFCRCELKLQKWYGDLRGKPFAIEAENSILDISGFSKQYNCAFIWQKDGVKKLNLYLIINYFKGGKLRFKKIKPEAFEANRFYTVINKKSGEIVPMEVNFNFDDPNLIILPLAFGKRQGREFIWNDLLSLETGSLKLANGRVIEKTLYNRRTRQDEPALFVALTFERREVLDSSNIKPMNLIGVDRGENIPAVIALTDPEGCPLSRFKDSLGNPTHILRIGESYKEKQRTIQAKKEVEQRRAGGYSRKYASKAKNLADDMVRNTARDLLYYAVTQDAMLIFENLSRGFGRQGKRTFAAERQYTRMEDWLTAKLAYEGLPSKTYLSKTLAQYTSKTCSNCGFTITSADYDRVLEKLKKTATGWMTTINGKELKVEGQITYYNRYKRQNVVKDLSVELDRLSEESVNNDISSWTKGRSGEALSLLKKRFSHRPVQEKFVCLNCGFETHADEQAALNIARSWLFLRSQEYKKYQTNKTTGNTDKRAFVETWQSFYRKKLKEVWKPAV

SEQ ID NO: 27031 - protein, 978 aa, Artificial Sequence
  CasX Variant
QEIKRINKIRRRLVKDSNTKKAGKTGPMKTLLVRVMTPDLRERLENLRKKPENIPQPISNTSRANLNKLLTDYTEMKKAILHVYWEEFQKDPVGLMSRVAQPASKKIDQNKLKPEMDEKGNLTTAGFACSQCGQPLFVYKLEQVSEKGKAYTNYFGRCNVAEHEKLILLAQLKPEKDSDEAVTYSLGKFGQRALDFYSIHVTKESTHPVKPLAQIAGNRYASGPVGKALSDACMGTIASFLSKYQDIIIEHQKVVKGNQKRLESLRELAGKENLEYPSVTLPPQPHTKEGVDAYNEVIARVRMWVNLNLWQKLKLSRDDAKPLLRLKGFPSFPLVERQANEVDWWDMVCNVKKLINEKKEDGKVFWQNLAGYKRQEALRPYLSSEEDRKKGKKFARYQLGDLLLHLEKKHGEDWGKVYDEAWERIDKKVEGLSKHIKLEEERRSEDAQSKAALTDWLRAKASFVIEGLKEADKDEFCRCELKLQKWYGDLRGKPFAIEAENSILDISGFSKQYNCAFIWQKDGVKKLNLYLIINYFKGGKLRFKKIKPEAFEANRFYTVINKKSGEIVPMEVNFNFDDPNLIILPLAFGKRQGREFIWNDLLSLETGSLKLANGRVIEKTLYNRRTRQDEPALFVALTFERREVLDSSNIKPMNLIGVDRGENIPAVIALTDPEGCPLSRFKDSLGNPTHILRIGESYKEKQRTIQAKKEVEQRRAGGYSRKYASKAKNLADDMVRNTARDLLYYAVTQDAMLIFENLSRGFGRQGKRTFMAERQYTRMEDWLTAKLAYEGLPSKTYLSKTLAQYTSKTCSNCGFTITSADYDRVLEKLKKTATGWMTTINGKELKVEGQITYYNRYKRQNVVKDLSVELDRLSEESVNNDISSWDKGRSGEALSLLKKRFSHRPVQEKFVCLNCGFETHADEQAALNIARSWLFLRSQEYKKYQTNKTTGNTDKRAFVETWQSFYRKKLKEVWKPAV

SEQ ID NO: 27032 - protein, 979 aa, Artificial Sequence
  CasX Variant
QEIKRINKIRRRLVKDSNTKKAGKTGPMKTLLVRVMTPDLRERLENLRKKPENIPQPISNTSRANLNKLLTDYTEMKKAILHVYWEEFQKDPVGLMSRVAQPASKKIDQNKLKPEMDEKGNLTTAGFACSQCGQPLFVYKLEQVSEKGKAYTNYFGRCNVAEHEKLILLAQLKPEKDSDEAVTYSLGKFGQRALDFYSIHVTKESTHPVKPLAQIAGNRYASGPVGKALSDACMGTIASFLSKYQDIIIEHQKVVKGNQKRLESLRELAGKENLEYPSVTLPPQPHTKEGVDAYNEVIARVRMWVNLNLWQKLKLSRDDAKPLLRLKGFPSFPLVERQANEVDWWDMVCNVKKLINEKKEDGKVFWQNLAGYKRQEALRPYLSSEEDRKKGKKFARYQLGDLLLHLEKKHGEDWGKVYDEAWERIDKKVEGLSKHIKLEEERRSEDAQSKAALTDWLRAKASFVIEGLKEADKDEFCRCELKLQKWYGDLRGKPFAIEAENSILDISGFSKQYNCAFIWQKDGVKKLNLYLIINYFKGGKLRFKKIKPEAFEANRFYTVINKKSGEIVPMEVNFNFDDPNLIILPLAFGKRQGREFIWNDLLSLETGSLKLANGRVIEKTLYNRRTRQDEPALFVALTFERREVLDSSNIKPMNLIGVDRGENIPAVIALTDPEGCPLSRFKDSLGNPTHILRIGESYKEKQRTIQAKKEVEQRRAGGYSRKYASKAKNLADDMVRNTARDLLYYAVTQDAMLIFENLSRGFGRQGKRTFMAERQYTRMEDWLTAKLAYEGLPSKTYLSKTLAQYTSKTCSNCGFTITSADYDRVLEKLKKTATGWMTTINGKELKVEGQITYYNRYKRQNVVKDLSVELDRLSEESVNNDISSWTKGRSGNEALSLLKKRFSHRPVQEKFVCLNCGFETHADEQAALNIARSWLFLRSQEYKKYQTNKTTGNTDKRAFVETWQSFYRKKLKEVWKPAV

SEQ ID NO: 27033 - protein, 978 aa, Artificial Sequence
  CasX Variant
QEIKRINKIRRRLVKDSNTKKAGKTGPMKTLLVRVMTPDLRERLENLRKKPENIPQPISNTSRANLNKLLTDYTEMKKAILHVYWEEFQKDPVGLMSRVAQPASKKIDQNKLKPEMDEKGNLTTAGFACSQCGQPLFVYKLEQVSEKGKAYTNYFGRCNVAEHEKLILLAQLKPEKDSDEAVTYSLGKFGQRALDFYSIHVTKESTHPVKPLAQIAGNRYASGPVGKALSDACMGTIASFLSKYQDIIIEHQKVVKGNQKRLESLRELAGKENLEYPSVTLPPQPHTKEGVDAYNEVIARVRMWVNLNLWQKLKLSRDDAKPLLRLKGFPSFPLVERQANEVDWWDMVCNVKKLINEKKEDGKVFWQNLAGYKRQEALRPYLSSEEDRKKGKKFARYQLGDLLLHLEKKHGEDWGKVYDEAWERIDKKVEGLSKHIKLEEERRSEDAQSKAALTDWLRAKASFVIEGLKEADKDEFCRCELKLQKWYGDLRGKPFAIEAENSILDISGFSKQYNCAFIWQKDGVKKLNLYLIINYFKGGKLRFKKIKPEAFEANRFYTVINKKSGEIVPMEVNFNFDDPNLIILPLAFGKRQGREFIWNDLLSLETGSLKLANGRVIEKTLYNRRTRQDEPALFVALTFERREVLDSSNIKPMNLIGVDRGENIPAVIALTDPEGCPLSRFKDSLGNPTHILRIGESYKEKQRTIQAKKEVEQRRAGGYSRKYASKAKNLADDMVRNTARDLLYYAVTQDAMLIFENLSRGFGRQGKRTFMAERQYTRMEDWLTAKLAYEGLPSKTYLSKTLAQYTSKTCSNCGFTITSADYDRVLEKLKKTATGWMTTINGKELKVEGQITYYNRYKRQNVVKDLSVELDRLSEESVNNDISSWTKGRSGEALSLLKKRFSHRPVQEKFVCLNCGFETHADEQAALNIARVWLFLRSQEYKKYQTNKTTGNTDKRAFVETWQSFYRKKLKEVWKPAV

SEQ ID NO: 27034 - protein, 978 aa, Artificial Sequence
  CasX Variant
QEIKRINKIRRRLVKDSNTKKAGKTGPMKTLLVRVMTPDLRERLENLRKKPENIPQPISNTSRANLNKLLTDYTEMKKAILHVYWEEFQKDPVGLMSRVAQPASKKIDQNKLKPEMDEKGNLTTAGFACSQCGQPLFVYKLEQVSEKGKAYTNYFGRCNVAEHEKLILLAQLKPEKDSDEAVTYSLGKFGQRALDFYSIHVTKESTHPVKPLAQIAGNRYASGPVGKALSDACMGTIASFLSKYQDIIIEHQKVVKGNQKRLESLRELAGKENLEYPSVTLPPQPHTKEGVDAYNEVIARVRMWVNLNLWQKLKLSRDDAKPLLRLKGFPSFPLVERQANEVDWWDMVCNVKKLINEKKEDGKVFWQNLAGYKRQEALRPYLSSEEDRKKGKKFARYQLGDLLLHLEKKHGEDWGKVYDEAWERIDKKVEGLSKHIKLEEERRSEDAQSKAALTDWLRAKASFVIEGLKEADKDEFCRCELKLQKWYGDLRGKPFAIEAENSILDISGFSKQYNCAFIWQKDGVKKLNLYLIINYFKGGKLRFKKIKPEAFEANRFYTVINKKSGEIVPMEVNFNFDDPNLIILPLAFGKRQGREFIWNDLLSLETGSLKLANGRVIEKTLYNRRTRQDEPALFVALTFERREVLDSSNIKPMNLIGVDRGENIPAVIALTDPEGCPLSRFKDSLGNPTHILRIGESYKEKQRTIQAKKEVEQRRAGGYSRKYASKAKNLADDMVRNTARDLLYYAVTQDAMLIFENLSRGFGRQGKRTFMAERQYTRMEDWLTAKLAYEGLPSKTYLSKTLAQYTSKTCSNCGFTITSADYDRVLEKLKKTATGWMTTINGKELKVEGQITYYNRYKRQNVVKDLSVELDRLSEESVNNDISSWTKGRSGEALSLLKKRFSHRPVQEKFVCLNCGFETHADEQAALNIARSWLFLRSQEYKKYQTNKTTINTDKRAFVETWQSFYRKKLKEVWKPAV

SEQ ID NO: 27035 - protein, 977 aa, Artificial Sequence
  CasX Variant
QEIKRINKIRRRLVKDSNTKKAGKTGPMKTLLVRVMTPDLRERLENLRKKPENIPQPISNTSRANLNKLLTDYTEMKKAILHVYWEEFQKDPVGLMSRVAQPASKKIDQNKLKPEMDEKGNLTTAGFACSQCGQPLFVYKLEQVSEKGKAYTNYFGRCNVAEHEKLILLAQLKPEKDSDEAVTYSLGKFGQRALDFYSIHVTKESTHPVKPLAQIAGNRYASGPVGKALSDACMGTIASFLSKYQDIIIEHQKVVKGNQKRLESLRELAGKENLEYPSVTLPPQPHTKEGVDAYNEVIARVRMWVNLNLWQKLKLSRDDAKPLLRLKGFPSFPLVERQANEVDWWDMVCNVKKLINEKKEDGKVFWQNLAGYKRQEALRPYLSSPEDRKKGKKFARYQFGDLLLHLEKKHGEDWGKVYDEAWERIDKKVEGLSKHIKLEEERRSEDAQSKAALTDWLRAKASFVIEGLKEADKDEFCRCELKLQKWYGDLRGKPFAIEAENSILDISGFSKQYNCAFIWQKDGVKKLNLYLIINYFKGGKLRFKKIKPEAFEANRFYTVINKKSGEIVPMEVNFNFDDPNLIILPLAFGKRQGREFIWNDLLSLETGSLKLANGRVIEKTLYNRRTRQDEPALFVALTFERREVLDSSNIKPMNLIGVDRGENIPAVIALTDPEGCPLSRFKDSLGNPTHILRIGESYKEKQRTIQAKKEVEQRRAGGYSRKYASKAKNLANDMVRNTARDLLYYAVTQDAMLIFENLSRGFGRQGKRTFMAERQYTRMEDWLTAKLAYEGLSKTYLSKTLAQYTSKTCSNCGFTITSADYDRVLEKLKKTATGWMTTINGKELKVEGQITYYNRRKRQNVVKDLSVELDRLSEESVNNDISSWTKGRSGEALSLLKKRFSHRPVQEKFVCLNCGFETHADEQAALNIARSWLFLRSQEYKKYQTNKTTGNTDKRAFVETWQSFYRKKLKEVWKPAV

SEQ ID NO: 27036 - protein, 977 aa, Artificial Sequence
  CasX Variant
QEIKRINKIRRRLVKDSNTKKAGKTGPMKTLLVRVMTPDLRERLENLRKKPENIPQPISNTSRANLNKLLTDYTEMKKAILHVYWEEFQKDPVGLMSRVAQPASKKIDQNKLKPEMDEKGNLTTAGFACSQCGQPLFVYKLEQVSEKGKAYTNYFGRCNVAEHEKLILLAQLKPEKDSDEAVTYSLGKFGQRALDFYSIHVTKESTHPVKPLAQIAGNRYASGPVGKALSDACMGTIASFLSKYQDIIIEHQKVVKGNQKRLESLRELAGKENLEYPSVTLPPQPHTKEGVDAYNEVIARVRMWVNLNLWQKLKLSRDDAKPLLRLKGFPSFPLVERQANEVDWWDMVCNVKKLINEKKEDGKVFWQNLAGYKRQEALRPYLSSEEDRKKGKKFARYQLGDLLLHLEKKHGEDWGKVYDEAWERIDKKVEGLSKHIKLEEERRSEDAQSKAALTDWLRAKASFVIEGLKEADKDEFSRCELKLQKWYGDLRGKPFAIEAENSILDISGFSKQYNCAFIWQKDGVKKLNLYLIINYFKGGKLRFKKIKPEAFEANRFYTVINKKSGEIVPMEVNFNFDDPNLIILPLAFGKRQGREFIWNDLLSLETGSLKLANGRVIEKTLYNRRTRQDEPALFVALTFERREVLDSSNIKPMNLIGVDRGENIPAVIALTDPEGCPLSRFKDSLGNPTHILRIGESYKEKQRTIQAKKEVEQRRAGGYSRKYASKAKNLADDMVRNTARDLLYYAVTQDAMLIFENLSRGFGRQGKRTFMAERQYTRMEDWLTAKLAYEGLSKTYLSKTLAQYTSKTCSNCGFTITSADYDRVLEKLKKTATGWMTTINGKELKVEGQITYYNRRKRQNVVKDLSVELDRLSEESVNNDISSWTKGRSGEALSLLKKRFSHRPVQEKFVCLNCGFETHADEQAALNIARSWLFLRSQEYKKYQTNKTTGNTDKRAFVETWQSFYRKKLKEVWKPAV

SEQ ID NO: 27037 - protein, 977 aa, Artificial Sequence
  CasX Variant
QEIKRINKIRRRLVKDSNTKKAGKTGPMKTLLVRVMTPDLRERLENLRKKPENIPQPISNTSRANLNKLLTDYTEMKKAILHVYWEEFQKDPVGLMSRVAQPASKKIDQNKLKPEMDEKGNLTTAGFACSQCGQPLFVYKLEQVSEKGKAYTNYFGRCNVAEHEKLILLAQLKPEKDSDEAVTYSLGKFGQRALDFYSIHVTKESTHPVKPLAQIAGNRYASGPVGKALSDACMGTIASFLSKYQDIIIEHQKVVKGNQKRLESLRELAGKENLEYPSVTLPPQPHTKEGVDAYNEVIARVRMWVNLNLWQKLKLSRDDAKPLLRLKGFPSFPLVERQANEVDWWDMVCNVKKLINEKKEDGKVFWQNLAGYKRQEALRPYLSSENDRKKGKKFARYQFGDLLKHLEKKHGEDWGKVYDEAWERIDKKVEGLSKHIKLEEERRSEDAQSKAALTDWLRAKASFVIEGLKEADKDEFSRCELKLQKWYGDLRGKPFAIEAENSILDISGFSKQYNCAFIWQKDGVKKLNLYLIINYFKGGKLRFKKIKPEAFEANRFYTVINKKSGEIVPMEVNFNFDDPNLIILPLAFGKRQGREFIWNDLLSLETGSLKLANGRVIEKTLYNRRTRQDEPALFVALTFERREVLDSSNIKPMNLIGVDRGENIPAVIALTDPEGCPLSRFKDSLGNPTHILRIGESYKEKQRTIQAKKEVEQRRAGGYSRKYASKAKNLADDMVRNTARDLLYYAVTQDAMLIFENLSRGFGRQGKRTFMAERQYTRMEDWLTAKLAYEGLSKTLLSKTLAQYTSKTCSNCGFTITSADYDRVLEKLKKTATGWMTTINGKELKVEGQITYYNRRKRQNVVKDLSVELDRLSEESVNNDISSWTKGRSGEALSLLKKRFSHRPVQEKFVCLNCGFETHADEQAALNIARSWLFLRSQEYKKYQTNKTTGNTDKRAFVETWQSFYRKKLKEVWKPAV

SEQ ID NO: 27038 - protein, 977 aa, Artificial Sequence
  CasX Variant
QEIKRINKIRRRLVKDSNTKKAGKTGPMKTLLVRVMTPDLRERLENLRKKPENIPQPISNTSRANLNKLLTDYTEMKKAILHVYWEEFQKDPVGLMSRVAQPASKKIDQNKLKPEMDEKGNLTTAGFACSQCGQPLFVYKLEQVSEKGKAYTNYFGRCNVAEHEKLILLAQLKPEKDSDEAVTYSLGKFGQRALDFYSIHVTKESTHPVKPLAQIAGNRYASGPVGKALSDACMGTIASFLSKYQDIIIEHQKVVKGNQKRLESLRELAGKENLEYPSVTLPPQPHTKEGVDAYNEVIARVRMWVNLNLWQKLKLSRDDAKPLLRLKGFPSFPLVERQANEVDWWDMVCNVKKLINEKKEDGKVFWQNLAGYKRQEALRPYLSSPEDRKKGKKFARYQLGDLLLHLEKKHGEDWGKVYDEAWERIDKKVEGLSKHIKLEEERRSEDAQSKAALTDWLRAKASFVIEGLKEADKDEFCRCELKLQKWYGDLRGKPFAIEAENSILDISGFSKQYNCAFIWQKDGVKKLNLYLIINYFKGGKLRFKKIKPEAFEANRFYTVINKKSGEIVPMEVNFNFDDPNLIILPLAFGKRQGREFIWNDLLSLETGSLKLANGRVIEKTLYNRRTRQDEPALFVALTFERREVLDSSNIKPMNLIGVDRGENIPAVIALTDPEGCPLSRFKDSLGNPTHILRIGESYKEKQRTIQAKKEVEQRRAGGYSRKYASKAKNLANDMVRNTARDLLYYAVTQDAMLIFENLSRGFGRQGKRTFMAERQYTRMEDWLTAKLAYEGLSKTYLSKTLAQYTSKTCSNCGFTITSADYDRVLEKLKKTATGWMTTINGKELKVEGQITYYNRRKRQNVVKDLSVELDRLSEESVNNDISSWTKGRSGEALSLLKKRFSHRPVQEKFVCLNCGFETHADEQAALNIARSWLFLRSQEYKKYQTNKTTGNTDKRAFVETWQSFYRKKLKEVWKPAV

SEQ ID NO: 27039 - protein, 977 aa, Artificial Sequence
  CasX Variant
QEIKRINKIRRRLVKDSNTKKAGKTGPMKTLLVRVMTPDLRERLENLRKKPENIPQPISNTSRANLNKLLTDYTEMKKAILHVYWEEFQKDPVGLMSRVAQPASKKIDQNKLKPEMDEKGNLTTAGFACSQCGQPLFVYKLEQVSEKGKAYTNYFGRCNVAEHEKLILLAQLKPEKDSDEAVTYSLGKFGQRALDFYSIHVTKESTHPVKPLAQIAGNRYASGPVGKALSDACMGTIASFLSKYQDIIIEHQKVVKGNQKRLESLRELAGKENLEYPSVTLPPQPHTKEGVDAYNEVIARVRMWVNLNLWQKLKLSRDDAKPLLRLKGFPSFPLVERQANEVDWWDMVCNVKKLINEKKEDGKVFWQNLAGYKRQEALRPYLSSPEDRKKGKKFARYQLGDLLLHLEKKHGEDWGKVYDEAWERIDKKVEGLSKHIKLEEERRSEDAQSKAALTDWLRAKASFVIEGLKEADKDEFCRCELKLQKWYGDLRGKPFAIEAENSILDISGFSKQYNCAFIWQKDGVKKLNLYLIINYFKGGKLRFKKIKPEAFEANRFYTVINKKSGEIVPMEVNFNFDDPNLIILPLAFGKRQGREFIWNDLLSLETGSLKLANGRVIEKPLYNRRTRQDEPALFVALTFERREVLDSSNIKPMNLIGVDRGENIPAVIALTDPEGCPLSRFKDSLGNPTHILRIGESYKEKQRTIQAKKEVEQRRAGGYSRKYASKAKNLADDMVRNTARDLLYYAVTQDAMLIFENLSRGFGRQGKRTFMAERQYTRMEDWLTAKLAYEGLSKTYLSKTLAQYTSKTCSNCGFTITSADYDRVLEKLKKTATGWMTTINGKELKVEGQITYYNRRKRQNVVKDLSVELDRLSEESVNNDISSWTKGRSGEALSLLKKRFSHRPVQEKFVCLNCGFETHADEQAALNIARSWLFLRSQEYKKYQTNKTTGNTDKRAFVETWQSFYRKKLKEVWKPAV

SEQ ID NO: 27040 - protein, 978 aa, Artificial Sequence
  CasX Variant
QEIKRINKIRRRLVKDSNTKKAGKTGPMKTLLVRVMTPDLRERLENLRKKPENIPQPISNTSRANLNKLLTDYTEMKKAILHVYWEEFQKDPVGLMSRVAQPASKKIDQNKLKPEMDEKGNLTTAGFACSQCGQPLFVYKLEQVSEKGKAYTNYFGRCNVAEHEKLILLAQLKPEKDSDEAVTYSLGKFGQRALDFYSIHVTKESTHPVKPLAQIAGNRYASGPVGKALSDACMGTIASFLSKYQDIIIEHQKVVKGNQKRLESLRELAGKENLEYPSVTLPPQPHTKEGVDAYNEVIARVRMWVNLNLWQKLKLSRDDAKPLLRLKGFPSFPLVERQANEVDWWDMVCNVKKLINEKKEDGKVFWQNLAGYKRQEALRPYLSSEEDRKKGKKFARYQLGDLLLHLEKKHGEDWGKVYDEAWERIDKKVEGLSKHIKLEEERRSEDAQSKAALTDWLRAKASFVIEGLKEADKDEFCRCELKLQKWYGDLRGKPFAIEAENSILDISGFSKQYNCAFIWQKDGVKKLNLYLIINYFKGGKLRFKKIKPEAFEANRFYTVINKKSGEIVPMEVNFNFDDPNLIILPLAFGKRQGREFIWNDLLSLETGSLKLANGRVIEKTLYNRRTRQDEPALFVALTFEDREVLDSSNIKPMNLIGVDRGENIPAVIALTDPEGCPLSRFKDSLGNPTHILRIGESYKEKQRTIQAKKEVEQRRAGGYSRKYASKAKNLADDMVRNTARDLLYYAVTQDAMLIFENLSRGFGRQGKRTFMAERQYTRMEDWLTAKLAYEGLPSKTYLSKTLAQYTSKTCSNCGFTITSADYDRVLEKLKKTATGWMTTINGKELKVEGQITYYNRYKRQNVVKDLSVELDRLSEESVNNDISSWTKGRSGEALSLLKKRFSHRPVQEKFVCLNCGFETHADEQAALNIARSWLFLRSQEYKKYQTNKTTGNTDKRAFVETWQSFYRKKLKEVWKPAV

SEQ ID NO: 27041 - protein, 979 aa, Artificial Sequence
  CasX Variant
QEIKRINKIRRRLVKDSNTKKAGKTGPMKTLLVRVMTPDLRERLENLRKKPENIPQPISNTSRANLNKLLTDYTEMKKAILHVYWEEFQKDPVGLMSRVAQPASKKIDQNKLKPEMDEKGNLTTAGFACSQCGQPLFVYKLEQVSEKGKAYTNYFGRCNVAEHEKLILLAQLKPEKDSDEAVTYSLGKFGQRALDFYSIHVTKESTHPVKPLAQIAGNRYASGPVGKALSDACMGTIASFLSKYQDIIIEHQKVVKGNQKRLESLRELAGKENLEYPSVTLPPQPHTKEGVDAYNEVIARVRMWVNLNLWQKLKLSRDDAKPLLRLKGFPSFPLVERQANEVDWWDMVCNVKKLINEKKEDGKVFWQNLAGYKRQEALRPYLSSEEDRKKGKKFARYQLGDLLLHLEKKHGEDWGKVYDEAWERIDKKVEGLSKHIKLEEERRSEDAQSKAALTDWLRAKASFVIEGLKEADKDEFCRCELKLQKWYGDLRGKHPFAIEAENSILDISGFSKQYNCAFIWQKDGVKKLNLYLIINYFKGGKLRFKKIKPEAFEANRFYTVINKKSGEIVPMEVNFNFDDPNLIILPLAFGKRQGREFIWNDLLSLETGSLKLANGRVIEKTLYNRRTRQDEPALFVALTFERREVLDSSNIKPMNLIGVDRGENIPAVIALTDPEGCPLSRFKDSLGNPTHILRIGESYKEKQRTIQAKKEVEQRRAGGYSRKYASKAKNLADDMVRNTARDLLYYAVTQDAMLIFENLSRGFGRQGKRTFMAERQYTRMEDWLTAKLAYEGLPSKTYLSKTLAQYTSKTCSNCGFTITSADYDRVLEKLKKTATGWMTTINGKELKVEGQITYYNRYKRQNVVKDLSVELDRLSEESVNNDISSWTKGRSGEALSLLKKRFSHRPVQEKFVCLNCGFETHADEQAALNIARSWLFLRSQEYKKYQTNKTTGNTDKRAFVETWQSFYRKKLKEVWKPAV

SEQ ID NO: 27042 - protein, 979 aa, Artificial Sequence
  CasX Variant
QEIKRINKIRRRLVKDSNTKKAGKTGPMKTLLVRVMTPDLRERLENLRKKPENIPQPISNTSRANLNKLLTDYTEMKKAILHVYWEEFQKDPVGLMSRVAQPASKKIDQNKLKPEMDEKGNLTTAGFACSQCGQPLFVYKLEQVSEKGKAYTNYFGRCNVAEHEKLILLAQLKPEKDSDEAVTYSLGKFGQRALDFYSIHVTKESTHPVKPLAQIAGNRYASGPVGKALSDACMGTIASFLSKYQDIIIEHQKVVKGNQKRLESLRELAGKENLEYPSVTLPPQPHTKEGVDAYNEVIARVRMWVNLNLWQKLKLSRDDAKPLLRLKGFPSFPLVERQANEVDWWDMVCNVKKLIINEKKEDGKVFWQNLAGYKRQEALRPYLSSEEDRKKGKKFARYQLGDLLLHLEKKHGEDWGKVYDEAWERIDKKVEGLSKHIKLEEERRSEDAQSKAALTDWLRAKASFVIEGLKEADKDEFCRCELKLQKWYGDLRGKPFAIEAENSILDISGFSKQYNCAFIWQKDGVKKLNLYLIINYFKGGKLRFKKIKPEAFEANRFYTVINKKSGEIVPMEVNFNFDDPNLIILPLAFGKRQGREFIWNDLLSLETGSLKLANGRVIEKTLYNRRTRQDEPALFVALTFERREVLDSSNIKPMNLIGVDRGENIPAVIALTDPEGCPLSRFKDSLGNPTHILRIGESYKEKQRTIQAKKEVEQRRAGGYSRKYASKAKNLADDMVRNTARDLLYYAVTQDAMLIFENLSRGFGRQGKRTFMAERQYTRMEDWLTAKLAYEGLPSKTYLSKTLAQYTSKTCSNCGFTITSADYDRVLEKLKKTATGWMTTINGKELKVEGQITYYNRYKRQNVVKDLSVELDRLSEESVNNDISSWTKGRSGEALSLLKKRFSHRPVQEKFVCLNCGFETHADEQAALNIARSWLFLRSQEYKKYQTNKTTGNTDKRAFVETWQSFYRKKLKEVWKPAV

SEQ ID NO: 27043 - protein, 979 aa, Artificial Sequence
  CasX Variant
QEIKRINKIRRRLVKDSNTKKAGKTRGPMKTLLVRVMTPDLRERLENLRKKPENIPQPISNTSRANLNKLLTDYTEMKKAILHVYWEEFQKDPVGLMSRVAQPASKKIDQNKLKPEMDEKGNLTTAGFACSQCGQPLFVYKLEQVSEKGKAYTNYFGRCNVAEHEKLILLAQLKPEKDSDEAVTYSLGKFGQRALDFYSIHVTKESTHPVKPLAQIAGNRYASSPVGKALSDACMGTIASFLSKYQDIIIEHQKVVKGNQKRLESLRELAGKENLEYPSVTLPPQPHTKEGVDAYNEVIARVRMWVNLNLWQKLKLSRDDAKPLLRLKGFPSFPLVERQANEVDWWDMVCNVKKLINEKKEDGKVFWQNLAGYKRQEALRPYLSSEEDRKKGKKFARYQLGDLLLHLEKKHGEDWGKVYDEAWERIDKKVEGLSKHIKLEEERRSEDAQSKAALTDWLRAKASFVIEGLKEADKDEFCRCELKLQKWYGDLRGKPFAIEAENSILDISGFSKQYNCAFIWQKDGVKKLNLYLIINYFKGGKLRFKKIKPEAFEANRFYTVINKKSGEIVPMEVNFNFDDPNLIILPLAFGKRQGREFIWNDLLSLETGSLKLANGRVIEKTLYNRRTRQDEPALFVALTFERREVLDSSNIKPMNLIGVDRGENIPAVIALTDPEGCPLSRFKDSLGNPTHILRIGESYKEKQRTIQAKKEVEQRRAGGYSRKYASKAKNLADDMVRNTARDLLYYAVTQDAMLIFENLSRGFGRQGKRTFMAERQYTRMEDWLTAKLAYEGLPSKTYLSKTLAQYTSKTCSNCGFTITSADYDRVLEKLKKTATGWMTTINGKELKVEGQITYYNRYKRQNVVKDLSVELDRLSEESVNNDISSWTKGRSGEALSLLKKRFSHRPVQEKFVCLNCGFETHADEQAALNIARSWLFLRSQEYKKYQTNKTTGNTDKRAFVETWQSFYRKKLKEVWKPAV

SEQ ID NO: 27044 - protein, 979 aa, Artificial Sequence
  CasX Variant
QEIKRINKIRRRLVKDSNTKKAGKTRGPMKTLLVRVMTPDLRERLENLRKKPENIPQPISNTSRANLNKLLTDYTEMKKAILHVYWEEFQKDPVGLMSRVAQPASKKIDQNKLKPEMDEKGNLTTAGFACSQCGQPLFVYKLEQVSEKGKAYTNYFGRCNVAEHEKLILLAQLKPEKDSDEAVTYSLGKFGQRALDFYSIHVTKESTHPVKPLAQIAGNRYASGPVGKALSGACMGTIASFLSKYQDIIIEHQKVVKGNQKRLESLRELAGKENLEYPSVTLPPQPHTKEGVDAYNEVIARVRMWVNLNLWQKLKLSRDDAKPLLRLKGFPSFPLVERQANEVDWWDMVCNVKKLINEKKEDGKVFWQNLAGYKRQEALRPYLSSEEDRKKGKKFARYQLGDLLLHLEKKHGEDWGKVYDEAWERIDKKVEGLSKHIKLEEERRSEDAQSKAALTDWLRAKASFVIEGLKEADKDEFCRCELKLQKWYGDLRGKPFAIEAENSILDISGFSKQYNCAFIWQKDGVKKLNLYLIINYFKGGKLRFKKIKPEAFEANRFYTVINKKSGEIVPMEVNFNFDDPNLIILPLAFGKRQGREFIWNDLLSLETGSLKLANGRVIEKTLYNRRTRQDEPALFVALTFERREVLDSSNIKPMNLIGVDRGENIPAVIALTDPEGCPLSRFKDSLGNPTHILRIGESYKEKQRTIQAKKEVEQRRAGGYSRKYASKAKNLADDMVRNTARDLLYYAVTQDAMLIFENLSRGFGRQGKRTFMAERQYTRMEDWLTAKLAYEGLPSKTYLSKTLAQYTSKTCSNCGFTITSADYDRVLEKLKKTATGWMTTINGKELKVEGQITYYNRYKRQNVVKDLSVELDRLSEESVNNDISSWTKGRSGEALSLLKKRFSHRPVQEKFVCLNCGFETHADEQAALNIARSWLFLRSQEYKKYQTNKTTGNTDKRAFVETWQSFYRKKLKEVWKPAV

SEQ ID NO: 27045 - protein, 978 aa, Artificial Sequence
  CasX Variant
QEIKRINKIRRRLVKDSNTKKAGKTGPMKTLLVRVMTPDLRERLENLRKKPENIPQPISNTSRANLNKLLTDYTEMKKAILHVYWEEFQKDPVGLMSRVAQPASKKIDQNKLKPEMDEKGNLTTAGFACSQCGQPLFVYKLEQVSEKGKAYTNYFGRCNVAEHEKLILLAQLKPEKDSDEAVTYSLGKFGQRALDFYSIHVTKESTHPVKPLAQIAGNRYASGPVGKALSDACMGTIASFLSKYQDIIIEHQKVVKGNQKRLESLRELAGKENLEYPSVTLPPQPHTKEGVDAYNEVIARVRMWVNLNLWQKLKLSRDDAKPLLRLKGFPSFPLVERQANEVDWWDMVCNVKKLINEKKEDGKVFWQNLAGYKRQEALRPYLSSPEDRKKGKKFARYQFGDLLLHLEKKHGEDWGKVYDEAWERIDKKVEGLSKHIKLEEERRSEDAQSKAALTDWLRAKASFVIEGLKEADKDEFCRCELKLQKWYGDLRGKPFAIEAENSILDISGFSKQYNCAFIWQKDGVKKLNLYLIINYFKGGKLRFKKIKPEAFEANRFYTVINKKSGEIVPMEVNFNFDDPNLIILPLAFGKRQGREFIWNDLLSLETGSLKLANGRVIEKTLYNRRTRQDEPALFVALTFERREVLDSSNIKPMNLIGVDRGENIPAVIALTDPEGCPLSRFKDSLGNPTHILRIGESYKEKQRTIQAKKEVEQRRAGGYSRKYASKAKNLANDMVRNTARDLLYYAVTQDAMLIFENLSRGFGRQGKRTFMAERQYTRMEDWLTAKLAYEGLPSKTYLSKTLAQYTSKTCSNCGFTITSADYDRVLEKLKKTATGWMTTINGKELKVEGQITYYNRRKRQNVVKDLSVELDRLSEESVNNDISSWTKGRSGEALSLLKKRFSHRPVQEKFVCLNCGFETHADEQAALNIARSWLFLRSQEYKKYQTNKTTGNTDKRAFVETWQSFYRKKLKEVWKPAV

SEQ ID NO: 27046 - protein, 978 aa, Artificial Sequence
  CasX Variant
QEIKRINKIRRRLVKDSNTKKAGKTGPMKTLLVRVMTPDLRERLENLRKKPENIPQPISNTSRANLNKLLTDYTEMKKAILHVYWEEFQKDPVGLMSRVAQPASKKIDQNKLKPEMDEKGNLTTAGFACSQCGQPLFVYKLEQVSEKGKAYTNYFGRCNVAEHEKLIKLAQLKPEKDSDEAVTYSLGKFGQRALDFYSIHVTKESTHPVKPLAQIAGNRYASSPVGKALSDACMGTIASFLSKYQDIIIEHQKVVKGNQKRLESLRELAGKENLEYPSVTLPPQPHTKEGVDAYNEVIARVRMWVNLNLWQKLKLSRDDAKPLLRLKGFPSFPLVERQANEVDWWDMVCNVKKLINEKKEDGKVFWQNLAGYKRQEALRPYLSSEEDRKKGKKFARYQLGDLLLHLEKKHGEDWGKVYDEAWERIDKKVEGLSKHIKLEEERRSEDAQSKAALTDWLRAKASFVIEGLKEADKDEFCRCELKLQKWYGDLRGKPFAIEAENSILDISGFSKQYNCAFIWQKDGVKKLNLYLIINYFKGGKLRFKKIKPEAFEANRFYTVINKKSGEIVPMEVNFNFDDPNLIILPLAFGKRQGREFIWNDLLSLETGSLKLANGRVIEKTLYNRRTRQDEPALFVALTFERREVLDSSNIKPMNLIGVDRGENIPAVIALTDPEGCPLSRFKDSLGNPTHILRIGESYKEKQRTIQAKKEVEQRRAGGYSRKYASKAKNLADDMVRNTARDLLYYAVTQDAMLIFENLSRGFGRQGKRTFMAERQYTRMEDWLTAKLAYEGLPSKTYLSKTLAQYTSKTCSNCGFTITSADYDRVLEKLKKTATGWMTTINGKELKVEGQITYYNRYKRQNVVKDLSVELDRLSEESVNNDISSWTKGRSGEALSLLKKRFSHRPVQEKFVCLNCGFETHADEQAALNIARSWLFLRSQEYKKYQTNKTTGNTDKRAFVETWQSFYRKKLKEVWKPAV

SEQ ID NO: 27047 - protein, 978 aa, Artificial Sequence
  CasX Variant
QEIKRINKIRRRLVKDSNTKKAGKTGPMKTLLVRVMTPDLRERLENLRKKPENIPQPISNTSRANLNKLLTDYTEMKKAILHVYWEEFQKDPVGLMSRVAQPASKKIDQNKLKPEMDEKGNLTTAGFACSQCGQPLFVYKLEQVSEKGKAYTNYFGRCNVAEHEKLILLAQLKPEKDSDEAVTYSLGKFGQRALDFYSIHVTKESTHPVKPLAQIAGNRYASSPVGKALSGACMGTIASFLSKYQDIIIEHQKVVKGNQKRLESLRELAGKENLEYPSVTLPPQPHTKEGVDAYNEVIARVRMWVNLNLWQKLKLSRDDAKPLLRLKGFPSFPLVERQANEVDWWDMVCNVKKLINEKKEDGKVFWQNLAGYKRQEALRPYLSSEEDRKKGKKFARYQLGDLLLHLEKKHGEDWGKVYDEAWERIDKKVEGLSKHIKLEEERRSEDAQSKAALTDWLRAKASFVIEGLKEADKDEFCRCELKLQKWYGDLRGKPFAIEAENSILDISGFSKQYNCAFIWQKDGVKKLNLYLIINYFKGGKLRFKKIKPEAFEANRFYTVINKKSGEIVPMEVNFNFDDPNLIILPLAFGKRQGREFIWNDLLSLETGSLKLANGRVIEKTLYNRRTRQDEPALFVALTFERREVLDSSNIKPMNLIGVDRGENIPAVIALTDPEGCPLSRFKDSLGNPTHILRIGESYKEKQRTIQAKKEVEQRRAGGYSRKYASKAKNLADDMVRNTARDLLYYAVTQDAMLIFENLSRGFGRQGKRTFMAERQYTRMEDWLTAKLAYEGLPSKTYLSKTLAQYTSKTCSNCGFTITSADYDRVLEKLKKTATGWMTTINGKELKVEGQITYYNRYKRQNVVKDLSVELDRLSEESVNNDISSWTKGRSGEALSLLKKRFSHRPVQEKFVCLNCGFETHADEQAALNIARSWLFLRSQEYKKYQTNKTTGNTDKRAFVETWQSFYRKKLKEVWKPAV

SEQ ID NO: 27048 - protein, 978 aa, Artificial Sequence
  CasX Variant
QEIKRINKIRRRLVKDSNTKKAGKTGPMKTLLVRVMTPDLRERLENLRKKPENIPQPISNTSRANLNKLLTDYTEMKKAILHVYWEEFQKDPVGLMSRVAQPASKKIDQNKLKPEMDEKGNLTTAGFACSQCGQPLFVYKLEQVSEKGKAYTNYFGRCNVAEHEKLIKLAQLKPEKDSDEAVTYSLGKFGQRALDFYSIHVTKESTHPVKPLAQIAGNRYASSPVGKALSGACMGTIASFLSKYQDIIIEHQKVVKGNQKRLESLRELAGKENLEYPSVTLPPQPHTKEGVDAYNEVIARVRMWVNLNLWQKLKLSRDDAKPLLRLKGFPSFPLVERQANEVDWWDMVCNVKKLINEKKEDGKVFWQNLAGYKRQEALRPYLSSEEDRKKGKKFARYQLGDLLLHLEKKHGEDWGKVYDEAWERIDKKVEGLSKHIKLEEERRSEDAQSKAALTDWLRAKASFVIEGLKEADKDEFCRCELKLQKWYGDLRGKPFAIEAENSILDISGFSKQYNCAFIWQKDGVKKLNLYLIINYFKGGKLRFKKIKPEAFEANRFYTVINKKSGEIVPMEVNFNFDDPNLIILPLAFGKRQGREFIWNDLLSLETGSLKLANGRVIEKTLYNRRTRQDEPALFVALTFERREVLDSSNIKPMNLIGVDRGENIPAVIALTDPEGCPLSRFKDSLGNPTHILRIGESYKEKQRTIQAKKEVEQRRAGGYSRKYASKAKNLADDMVRNTARDLLYYAVTQDAMLIFENLSRGFGRQGKRTFMAERQYTRMEDWLTAKLAYEGLPSKTYLSKTLAQYTSKTCSNCGFTITSADYDRVLEKLKKTATGWMTTINGKELKVEGQITYYNRYKRQNVVKDLSVELDRLSEESVNNDISSWTKGRSGEALSLLKKRFSHRPVQEKFVCLNCGFETHADEQAALNIARSWLFLRSQEYKKYQTNKTTGNTDKRAFVETWQSFYRKKLKEVWKPAV

SEQ ID NO: 27049 - protein, 979 aa, Artificial Sequence
  CasX Variant
QEIKRINKIRRRLVKDSNTKKAGKTRGPMKTLLVRVMTPDLRERLENLRKKPENIPQPISNTSRANLNKLLTDYTEMKKAILHVYWEEFQKDPVGLMSRVAQPASKKIDQNKLKPEMDEKGNLTTAGFACSQCGQPLFVYKLEQVSEKGKAYTNYFGRCNVAEHEKLIKLAQLKPEKDSDEAVTYSLGKFGQRALDFYSIHVTKESTHPVKPLAQIAGNRYASGPVGKALSDACMGTIASFLSKYQDIIIEHQKVVKGNQKRLESLRELAGKENLEYPSVTLPPQPHTKEGVDAYNEVIARVRMWVNLNLWQKLKLSRDDAKPLLRLKGFPSFPLVERQANEVDWWDMVCNVKKLINEKKEDGKVFWQNLAGYKRQEALRPYLSSEEDRKKGKKFARYQLGDLLLHLEKKHGEDWGKVYDEAWERIDKKVEGLSKHIKLEEERRSEDAQSKAALTDWLRAKASFVIEGLKEADKDEFCRCELKLQKWYGDLRGKPFAIEAENSILDISGFSKQYNCAFIWQKDGVKKLNLYLIINYFKGGKLRFKKIKPEAFEANRFYTVINKKSGEIVPMEVNFNFDDPNLIILPLAFGKRQGREFIWNDLLSLETGSLKLANGRVIEKTLYNRRTRQDEPALFVALTFERREVLDSSNIKPMNLIGVDRGENIPAVIALTDPEGCPLSRFKDSLGNPTHILRIGESYKEKQRTIQAKKEVEQRRAGGYSRKYASKAKNLADDMVRNTARDLLYYAVTQDAMLIFENLSRGFGRQGKRTFMAERQYTRMEDWLTAKLAYEGLPSKTYLSKTLAQYTSKTCSNCGFTITSADYDRVLEKLKKTATGWMTTINGKELKVEGQITYYNRYKRQNVVKDLSVELDRLSEESVNNDISSWTKGRSGEALSLLKKRFSHRPVQEKFVCLNCGFETHADEQAALNIARSWLFLRSQEYKKYQTNKTTGNTDKRAFVETWQSFYRKKLKEVWKPAV

SEQ ID NO: 27050 - protein, 979 aa, Artificial Sequence
  CasX Variant
QEIKRINKIRRRLVKDSNTKKAGKTRGPMKTLLVRVMTPDLRERLENLRKKPENIPQPISNTSRANLNKLLTDYTEMKKAILHVYWEEFQKDPVGLMSRVAQPASKKIDQNKLKPEMDEKGNLTTAGFACSQCGQPLFVYKLEQVSEKGKAYTNYFGRCNVAEHEKLIKLAQLKPEKDSDEAVTYSLGKFGQRALDFYSIHVTKESTHPVKPLAQIAGNRYASSPVGKALSDACMGTIASFLSKYQDIIIEHQKVVKGNQKRLESLRELAGKENLEYPSVTLPPQPHTKEGVDAYNEVIARVRMWVNLNLWQKLKLSRDDAKPLLRLKGFPSFPLVERQANEVDWWDMVCNVKKLINEKKEDGKVFWQNLAGYKRQEALRPYLSSEEDRKKGKKFARYQLGDLLLHLEKKHGEDWGKVYDEAWERIDKKVEGLSKHIKLEEERRSEDAQSKAALTDWLRAKASFVIEGLKEADKDEFCRCELKLQKWYGDLRGKPFAIEAENSILDISGFSKQYNCAFIWQKDGVKKLNLYLIINYFKGGKLRFKKIKPEAFEANRFYTVINKKSGEIVPMEVNFNFDDPNLIILPLAFGKRQGREFIWNDLLSLETGSLKLANGRVIEKTLYNRRTRQDEPALFVALTFERREVLDSSNIKPMNLIGVDRGENIPAVIALTDPEGCPLSRFKDSLGNPTHILRIGESYKEKQRTIQAKKEVEQRRAGGYSRKYASKAKNLADDMVRNTARDLLYYAVTQDAMLIFENLSRGFGRQGKRTFMAERQYTRMEDWLTAKLAYEGLPSKTYLSKTLAQYTSKTCSNCGFTITSADYDRVLEKLKKTATGWMTTINGKELKVEGQITYYNRYKRQNVVKDLSVELDRLSEESVNNDISSWTKGRSGEALSLLKKRFSHRPVQEKFVCLNCGFETHADEQAALNIARSWLFLRSQEYKKYQTNKTTGNTDKRAFVETWQSFYRKKLKEVWKPAV

SEQ ID NO: 27051 - protein, 979 aa, Artificial Sequence
  CasX Variant
QEIKRINKIRRRLVKDSNTKKAGKTRGPMKTLLVRVMTPDLRERLENLRKKPENIPQPISNTSRANLNKLLTDYTEMKKAILHVYWEEFQKDPVGLMSRVAQPASKKIDQNKLKPEMDEKGNLTTAGFACSQCGQPLFVYKLEQVSEKGKAYTNYFGRCNVAEHEKLIKLAQLKPEKDSDEAVTYSLGKFGQRALDFYSIHVTKESTHPVKPLAQIAGNRYASSPVGKALSGACMGTIASFLSKYQDIIIEHQKVVKGNQKRLESLRELAGKENLEYPSVTLPPQPHTKEGVDAYNEVIARVRMWVNLNLWQKLKLSRDDAKPLLRLKGFPSFPLVERQANEVDWWDMVCNVKKLINEKKEDGKVFWQNLAGYKRQEALRPYLSSEEDRKKGKKFARYQLGDLLLHLEKKHGEDWGKVYDEAWERIDKKVEGLSKHIKLEEERRSEDAQSKAALTDWLRAKASFVIEGLKEADKDEFCRCELKLQKWYGDLRGKPFAIEAENSILDISGFSKQYNCAFIWQKDGVKKLNLYLIINYFKGGKLRFKKIKPEAFEANRFYTVINKKSGEIVPMEVNFNFDDPNLIILPLAFGKRQGREFIWNDLLSLETGSLKLANGRVIEKTLYNRRTRQDEPALFVALTFERREVLDSSNIKPMNLIGVDRGENIPAVIALTDPEGCPLSRFKDSLGNPTHILRIGESYKEKQRTIQAKKEVEQRRAGGYSRKYASKAKNLADDMVRNTARDLLYYAVTQDAMLIFENLSRGFGRQGKRTFMAERQYTRMEDWLTAKLAYEGLPSKTYLSKTLAQYTSKTCSNCGFTITSADYDRVLEKLKKTATGWMTTINGKELKVEGQITYYNRYKRQNVVKDLSVELDRLSEESVNNDISSWTKGRSGEALSLLKKRFSHRPVQEKFVCLNCGFETHADEQAALNIARSWLFLRSQEYKKYQTNKTTGNTDKRAFVETWQSFYRKKLKEVWKPAV

SEQ ID NO: 27052 - protein, 978 aa, Artificial Sequence
  CasX Variant
QEIKRINKIRRRLVKDSNTKKAGKTGPMKTLLVRVMTPDLRERLENLRKKPENIPQPISNTSRANLNKLLTDYTEMKKAILHVYWEEFQKDPVGLMSRVAQPASKKIDQNKLKPEMDEKGNLTTAGFACSQCGQPLFVYKLEQVSEKGKAYTNYFGRCNVAEHEKLILLAQLKPEKDSDEAVTYSLGKFGQRALDFYSIHVTKESTHPVKPLAQIAGNRYASYPVGKALSGACMGTIASFLSKYQDIIIEHQKVVKGNQKRLESLRELAGKENLEYPSVTLPPQPHTKEGVDAYNEVIARVRMWVNLNLWQKLKLSRDDAKPLLRLKGFPSFPLVERQANEVDWWDMVCNVKKLINEKKEDGKVFWQNLAGYKRQEALRPYLSSEEDRKKGKKFARYQLGDLLLHLEKKHGEDWGKVYDEAWERIDKKVEGLSKHIKLEEERRSEDAQSKAALTDWLRAKASFVIEGLKEADKDEFCRCELKLQKWYGDLRGKPFAIEAENSILDISGFSKQYNCAFIWQKDGVKKLNLYLIINYFKGGKLRFKKIKPEAFEANRFYTVINKKSGEIVPMEVNFNFDDPNLIILPLAFGKRQGREFIWNDLLSLETGSLKLANGRVIEKTLYNRRTRQDEPALFVALTFERREVLDSSNIKPMNLIGVDRGENIPAVIALTDPEGCPLSRFKDSLGNPTHILRIGESYKEKQRTIQAKKEVEQRRAGGYSRKYASKAKNLADDMVRNTARDLLYYAVTQDAMLIFENLSRGFGRQGKRTFMAERQYTRMEDWLTAKLAYEGLPSKTYLSKTLAQYTSKTCSNCGFTITSADYDRVLEKLKKTATGWMTTINGKELKVEGQITYYNRYKRQNVVKDLSVELDRLSEESVNNDISSWTKGRSGEALSLLKKRFSHRPVQEKFVCLNCGFETHADEQAALNIARSWLFLRSQEYKKYQTNKTTGNTDKRAFVETWQSFYRKKLKEVWKPAV

SEQ ID NO: 27053 - protein, 978 aa, Artificial Sequence
  CasX Variant
QEIKRINKIRRRLVKDSNTKKAGKTGPMKTLLVRVMTPDLRERLENLRKKPENIPQPISNTSRANLNKLLTDYTEMKKAILHVYWEEFQKDPVGLMSRVAQPASKKIDQNKLKPEMDEKGNLTTAGFACSQCGQPLFVYKLEQVSEKGKAYTNYFGRCNVAEHEKLILLAQLKPEKDSDEAVTYSLGKFGQRALDFYSIHVTKESTHPVKPLAQIAGNRYASHPVGKALSGACMGTIASFLSKYQDIIIEHQKVVKGNQKRLESLRELAGKENLEYPSVTLPPQPHTKEGVDAYNEVIARVRMWVNLNLWQKLKLSRDDAKPLLRLKGFPSFPLVERQANEVDWWDMVCNVKKLINEKKEDGKVFWQNLAGYKRQEALRPYLSSEEDRKKGKKFARYQLGDLLLHLEKKHGEDWGKVYDEAWERIDKKVEGLSKHIKLEEERRSEDAQSKAALTDWLRAKASFVIEGLKEADKDEFCRCELKLQKWYGDLRGKPFAIEAENSILDISGFSKQYNCAFIWQKDGVKKLNLYLIINYFKGGKLRFKKIKPEAFEANRFYTVINKKSGEIVPMEVNFNFDDPNLIILPLAFGKRQGREFIWNDLLSLETGSLKLANGRVIEKTLYNRRTRQDEPALFVALTFERREVLDSSNIKPMNLIGVDRGENIPAVIALTDPEGCPLSRFKDSLGNPTHILRIGESYKEKQRTIQAKKEVEQRRAGGYSRKYASKAKNLADDMVRNTARDLLYYAVTQDAMLIFENLSRGFGRQGKRTFMAERQYTRMEDWLTAKLAYEGLPSKTYLSKTLAQYTSKTCSNCGFTITSADYDRVLEKLKKTATGWMTTINGKELKVEGQITYYNRYKRQNVVKDLSVELDRLSEESVNNDISSWTKGRSGEALSLLKKRFSHRPVQEKFVCLNCGFETHADEQAALNIARSWLFLRSQEYKKYQTNKTTGNTDKRAFVETWQSFYRKKLKEVWKPAV

SEQ ID NO: 27054 - protein, 979 aa, Artificial Sequence
  CasX Variant
QEIKRINKIRRRLVKDSNTKKAGKTRGPMKTLLVRVMTPDLRERLENLRKKPENIPQPISNTSRANLNKLLTDYTEMKKAILHVYWEEFQKDPVGLMSRVAQPASKKIDQNKLKPEMDEKGNLTTAGFACSQCGQPLFVYKLEQVSEKGKAYTNYFGRCNVAEHEKLILLAQLKPEKDSDEAVTYSLGKFGQRALDFYSIHVTKESTHPVKPLAQIAGNRYASYPVGKALSGACMGTIASFLSKYQDIIIEHQKVVKGNQKRLESLRELAGKENLEYPSVTLPPQPHTKEGVDAYNEVIARVRMWVNLNLWQKLKLSRDDAKPLLRLKGFPSFPLVERQANEVDWWDMVCNVKKLINEKKEDGKVFWQNLAGYKRQEALRPYLSSEEDRKKGKKFARYQLGDLLLHLEKKHGEDWGKVYDEAWERIDKKVEGLSKHIKLEEERRSEDAQSKAALTDWLRAKASFVIEGLKEADKDEFCRCELKLQKWYGDLRGKPFAIEAENSILDISGFSKQYNCAFIWQKDGVKKLNLYLIINYFKGGKLRFKKIKPEAFEANRFYTVINKKSGEIVPMEVNFNFDDPNLIILPLAFGKRQGREFIWNDLLSLETGSLKLANGRVIEKTLYNRRTRQDEPALFVALTFERREVLDSSNIKPMNLIGVDRGENIPAVIALTDPEGCPLSRFKDSLGNPTHILRIGESYKEKQRTIQAKKEVEQRRAGGYSRKYASKAKNLADDMVRNTARDLLYYAVTQDAMLIFENLSRGFGRQGKRTFMAERQYTRMEDWLTAKLAYEGLPSKTYLSKTLAQYTSKTCSNCGFTITSADYDRVLEKLKKTATGWMTTINGKELKVEGQITYYNRYKRQNVVKDLSVELDRLSEESVNNDISSWTKGRSGEALSLLKKRFSHRPVQEKFVCLNCGFETHADEQAALNIARSWLFLRSQEYKKYQTNKTTGNTDKRAFVETWQSFYRKKLKEVWKPAV

SEQ ID NO: 27055 - protein, 979 aa, Artificial Sequence
  CasX Variant
QEIKRINKIRRRLVKDSNTKKAGKTRGPMKTLLVRVMTPDLRERLENLRKKPENIPQPISNTSRANLNKLLTDYTEMKKAILHVYWEEFQKDPVGLMSRVAQPASKKIDQNKLKPEMDEKGNLTTAGFACSQCGQPLFVYKLEQVSEKGKAYTNYFGRCNVAEHEKLILLAQLKPEKDSDEAVTYSLGKFGQRALDFYSIHVTKESTHPVKPLAQIAGNRYASHPVGKALSGACMGTIASFLSKYQDIIIEHQKVVKGNQKRLESLRELAGKENLEYPSVTLPPQPHTKEGVDAYNEVIARVRMWVNLNLWQKLKLSRDDAKPLLRLKGFPSFPLVERQANEVDWWDMVCNVKKLINEKKEDGKVFWQNLAGYKRQEALRPYLSSEEDRKKGKKFARYQLGDLLLHLEKKHGEDWGKVYDEAWERIDKKVEGLSKHIKLEEERRSEDAQSKAALTDWLRAKASFVIEGLKEADKDEFCRCELKLQKWYGDLRGKPFAIEAENSILDISGFSKQYNCAFIWQKDGVKKLNLYLIINYFKGGKLRFKKIKPEAFEANRFYTVINKKSGEIVPMEVNFNFDDPNLIILPLAFGKRQGREFIWNDLLSLETGSLKLANGRVIEKTLYNRRTRQDEPALFVALTFERREVLDSSNIKPMNLIGVDRGENIPAVIALTDPEGCPLSRFKDSLGNPTHILRIGESYKEKQRTIQAKKEVEQRRAGGYSRKYASKAKNLADDMVRNTARDLLYYAVTQDAMLIFENLSRGFGRQGKRTFMAERQYTRMEDWLTAKLAYEGLPSKTYLSKTLAQYTSKTCSNCGFTITSADYDRVLEKLKKTATGWMTTINGKELKVEGQITYYNRYKRQNVVKDLSVELDRLSEESVNNDISSWTKGRSGEALSLLKKRFSHRPVQEKFVCLNCGFETHADEQAALNIARSWLFLRSQEYKKYQTNKTTGNTDKRAFVETWQSFYRKKLKEVWKPAV

SEQ ID NO: 27056 - protein, 978 aa, Artificial Sequence
  CasX Variant
QEIKRINKIRRRLVKDSNTKKAGKTGPMKTLLVRVMTPDLRERLENLRKKPENIPQPISNTSRANLNKLLTDYTEMKKAILHVYWEEFQKDPVGLMSRVAQPASKKIDQNKLKPEMDEKGNLTTAGFACSQCGQPLFVYKLEQVSEKGKAYTNYFGRCNVAEHEKLIKLAQLKPEKDSDEAVTYSLGKFGQRALDFYSIHVTKESTHPVKPLAQIAGNRYASGPVGKALSGACMGTIASFLSKYQDIIIEHQKVVKGNQKRLESLRELAGKENLEYPSVTLPPQPHTKEGVDAYNEVIARVRMWVNLNLWQKLKLSRDDAKPLLRLKGFPSFPLVERQANEVDWWDMVCNVKKLINEKKEDGKVFWQNLAGYKRQEALRPYLSSEEDRKKGKKFARYQLGDLLLHLEKKHGEDWGKVYDEAWERIDKKVEGLSKHIKLEEERRSEDAQSKAALTDWLRAKASFVIEGLKEADKDEFCRCELKLQKWYGDLRGKPFAIEAENSILDISGFSKQYNCAFIWQKDGVKKLNLYLIINYFKGGKLRFKKIKPEAFEANRFYTVINKKSGEIVPMEVNFNFDDPNLIILPLAFGKRQGREFIWNDLLSLETGSLKLANGRVIEKTLYNRRTRQDEPALFVALTFERREVLDSSNIKPMNLIGVDRGENIPAVIALTDPEGCPLSRFKDSLGNPTHILRIGESYKEKQRTIQAKKEVEQRRAGGYSRKYASKAKNLADDMVRNTARDLLYYAVTQDAMLIFENLSRGFGRQGKRTFMAERQYTRMEDWLTAKLAYEGLPSKTYLSKTLAQYTSKTCSNCGFTITSADYDRVLEKLKKTATGWMTTINGKELKVEGQITYYNRYKRQNVVKDLSVELDRLSEESVNNDISSWTKGRSGEALSLLKKRFSHRPVQEKFVCLNCGFETHADEQAALNIARSWLFLRSQEYKKYQTNKTTGNTDKRAFVETWQSFYRKKLKEVWKPAV

SEQ ID NO: 27057 - protein, 978 aa, Artificial Sequence
  CasX Variant
QEIKRINKIRRRLVKDSNTKKAGKTGPMKTLLVRVMTPDLRERLENLRKKPENIPQPISNTSRANLNKLLTDYTEMKKAILHVYWEEFQKDPVGLMSRVAQPASKKIDQNKLKPEMDEKGNLTTAGFACSQCGQPLFVYKLEQVSEKGKAYTNYFGRCNVAEHEKLIKLAQLKPEKDSDEAVTYSLGKFGQRALDFYSIHVTKESTHPVKPLAQIAGNRYASYPVGKALSGACMGTIASFLSKYQDIIIEHQKVVKGNQKRLESLRELAGKENLEYPSVTLPPQPHTKEGVDAYNEVIARVRMWVNLNLWQKLKLSRDDAKPLLRLKGFPSFPLVERQANEVDWWDMVCNVKKLINEKKEDGKVFWQNLAGYKRQEALRPYLSSEEDRKKGKKFARYQLGDLLLHLEKKHGEDWGKVYDEAWERIDKKVEGLSKHIKLEEERRSEDAQSKAALTDWLRAKASFVIEGLKEADKDEFCRCELKLQKWYGDLRGKPFAIEAENSILDISGFSKQYNCAFIWQKDGVKKLNLYLIINYFKGGKLRFKKIKPEAFEANRFYTVINKKSGEIVPMEVNFNFDDPNLIILPLAFGKRQGREFIWNDLLSLETGSLKLANGRVIEKTLYNRRTRQDEPALFVALTFERREVLDSSNIKPMNLIGVDRGENIPAVIALTDPEGCPLSRFKDSLGNPTHILRIGESYKEKQRTIQAKKEVEQRRAGGYSRKYASKAKNLADDMVRNTARDLLYYAVTQDAMLIFENLSRGFGRQGKRTFMAERQYTRMEDWLTAKLAYEGLPSKTYLSKTLAQYTSKTCSNCGFTITSADYDRVLEKLKKTATGWMTTINGKELKVEGQITYYNRYKRQNVVKDLSVELDRLSEESVNNDISSWTKGRSGEALSLLKKRFSHRPVQEKFVCLNCGFETHADEQAALNIARSWLFLRSQEYKKYQTNKTTGNTDKRAFVETWQSFYRKKLKEVWKPAV

SEQ ID NO: 27058 - protein, 979 aa, Artificial Sequence
  CasX Variant
QEIKRINKIRRRLVKDSNTKKAGKTRGPMKTLLVRVMTPDLRERLENLRKKPENIPQPISNTSRANLNKLLTDYTEMKKAILHVYWEEFQKDPVGLMSRVAQPASKKIDQNKLKPEMDEKGNLTTAGFACSQCGQPLFVYKLEQVSEKGKAYTNYFGRCNVAEHEKLIKLAQLKPEKDSDEAVTYSLGKFGQRALDFYSIHVTKESTHPVKPLAQIAGNRYASGPVGKALSGACMGTIASFLSKYQDIIIEHQKVVKGNQKRLESLRELAGKENLEYPSVTLPPQPHTKEGVDAYNEVIARVRMWVNLNLWQKLKLSRDDAKPLLRLKGFPSFPLVERQANEVDWWDMVCNVKKLINEKKEDGKVFWQNLAGYKRQEALRPYLSSEEDRKKGKKFARYQLGDLLLHLEKKHGEDWGKVYDEAWERIDKKVEGLSKHIKLEEERRSEDAQSKAALTDWLRAKASFVIEGLKEADKDEFCRCELKLQKWYGDLRGKPFAIEAENSILDISGFSKQYNCAFIWQKDGVKKLNLYLIINYFKGGKLRFKKIKPEAFEANRFYTVINKKSGEIVPMEVNFNFDDPNLIILPLAFGKRQGREFIWNDLLSLETGSLKLANGRVIEKTLYNRRTRQDEPALFVALTFERREVLDSSNIKPMNLIGVDRGENIPAVIALTDPEGCPLSRFKDSLGNPTHILRIGESYKEKQRTIQAKKEVEQRRAGGYSRKYASKAKNLADDMVRNTARDLLYYAVTQDAMLIFENLSRGFGRQGKRTFMAERQYTRMEDWLTAKLAYEGLPSKTYLSKTLAQYTSKTCSNCGFTITSADYDRVLEKLKKTATGWMTTINGKELKVEGQITYYNRYKRQNVVKDLSVELDRLSEESVNNDISSWTKGRSGEALSLLKKRFSHRPVQEKFVCLNCGFETHADEQAALNIARSWLFLRSQEYKKYQTNKTTGNTDKRAFVETWQSFYRKKLKEVWKPAV

SEQ ID NO: 27059 - protein, 979 aa, Artificial Sequence
  CasX Variant
QEIKRINKIRRRLVKDSNTKKAGKTRGPMKTLLVRVMTPDLRERLENLRKKPENIPQPISNTSRANLNKLLTDYTEMKKAILHVYWEEFQKDPVGLMSRVAQPASKKIDQNKLKPEMDEKGNLTTAGFACSQCGQPLFVYKLEQVSEKGKAYTNYFGRCNVAEHEKLIKLAQLKPEKDSDEAVTYSLGKFGQRALDFYSIHVTKESTHPVKPLAQIAGNRYASYPVGKALSGACMGTIASFLSKYQDIIIEHQKVVKGNQKRLESLRELAGKENLEYPSVTLPPQPHTKEGVDAYNEVIARVRMWVNLNLWQKLKLSRDDAKPLLRLKGFPSFPLVERQANEVDWWDMVCNVKKLINEKKEDGKVFWQNLAGYKRQEALRPYLSSEEDRKKGKKFARYQLGDLLLHLEKKHGEDWGKVYDEAWERIDKKVEGLSKHIKLEEERRSEDAQSKAALTDWLRAKASFVIEGLKEADKDEFCRCELKLQKWYGDLRGKPFAIEAENSILDISGFSKQYNCAFIWQKDGVKKLNLYLIINYFKGGKLRFKKIKPEAFEANRFYTVINKKSGEIVPMEVNFNFDDPNLIILPLAFGKRQGREFIWNDLLSLETGSLKLANGRVIEKTLYNRRTRQDEPALFVALTFERREVLDSSNIKPMNLIGVDRGENIPAVIALTDPEGCPLSRFKDSLGNPTHILRIGESYKEKQRTIQAKKEVEQRRAGGYSRKYASKAKNLADDMVRNTARDLLYYAVTQDAMLIFENLSRGFGRQGKRTFMAERQYTRMEDWLTAKLAYEGLPSKTYLSKTLAQYTSKTCSNCGFTITSADYDRVLEKLKKTATGWMTTINGKELKVEGQITYYNRYKRQNVVKDLSVELDRLSEESVNNDISSWTKGRSGEALSLLKKRFSHRPVQEKFVCLNCGFETHADEQAALNIARSWLFLRSQEYKKYQTNKTTGNTDKRAFVETWQSFYRKKLKEVWKPAV

SEQ ID NO: 27060 - protein, 979 aa, Artificial Sequence
  CasX Variant
QEIKRINKIRRRLVKDSNTKKAGKTRGPMKTLLVRVMTPDLRERLENLRKKPENIPQPISNTSRANLNKLLTDYTEMKKAILHVYWEEFQKDPVGLMSRVAQPASKKIDQNKLKPEMDEKGNLTTAGFACSQCGQPLFVYKLEQVSEKGKAYTNYFGRCNVAEHEKLIKLAQLKPEKDSDEAVTYSLGKFGQRALDFYSIHVTKESTHPVKPLAQIAGNRYASHPVGKALSGACMGTIASFLSKYQDIIIEHQKVVKGNQKRLESLRELAGKENLEYPSVTLPPQPHTKEGVDAYNEVIARVRMWVNLNLWQKLKLSRDDAKPLLRLKGFPSFPLVERQANEVDWWDMVCNVKKLINEKKEDGKVFWQNLAGYKRQEALRPYLSSEEDRKKGKKFARYQLGDLLLHLEKKHGEDWGKVYDEAWERIDKKVEGLSKHIKLEEERRSEDAQSKAALTDWLRAKASFVIEGLKEADKDEFCRCELKLQKWYGDLRGKPFAIEAENSILDISGFSKQYNCAFIWQKDGVKKLNLYLIINYFKGGKLRFKKIKPEAFEANRFYTVINKKSGEIVPMEVNFNFDDPNLIILPLAFGKRQGREFIWNDLLSLETGSLKLANGRVIEKTLYNRRTRQDEPALFVALTFERREVLDSSNIKPMNLIGVDRGENIPAVIALTDPEGCPLSRFKDSLGNPTHILRIGESYKEKQRTIQAKKEVEQRRAGGYSRKYASKAKNLADDMVRNTARDLLYYAVTQDAMLIFENLSRGFGRQGKRTFMAERQYTRMEDWLTAKLAYEGLPSKTYLSKTLAQYTSKTCSNCGFTITSADYDRVLEKLKKTATGWMTTINGKELKVEGQITYYNRYKRQNVVKDLSVELDRLSEESVNNDISSWTKGRSGEALSLLKKRFSHRPVQEKFVCLNCGFETHADEQAALNIARSWLFLRSQEYKKYQTNKTTGNTDKRAFVETWQSFYRKKLKEVWKPAV

SEQ ID NO: 27061 - protein, 979 aa, Artificial Sequence; identical to SEQ ID NO: 26909
  CasX Variant

SEQ ID NO: 27062 - protein, 979 aa, Artificial Sequence
  CasX Variant
QEIKRINKIRRRLVKDSNTKKAGKTRGPMKTLLVRVMTPDLRERLENLRKKPENIPQPISNTSRANLNKLLTDYTEMKKAILHVYWEEFQKDPVGLMSRVAQPASKKIDQNKLKPEMDEKGNLTTAGFACSQCGQPLFVYKLEQVSEKGKAYTNYFGRCNVAEHEKLILLAQLKPEKDSDEAVTYSLGKFGQRALDFYSIHVTKESTHPVKPLAQIAGNRYASHPVGKALSDACMGTIASFLSKYQDIIIEHQKVVKGNQKRLESLRELAGKENLEYPSVTLPPQPHTKEGVDAYNEVIARVRMWVNLNLWQKLKLSRDDAKPLLRLKGFPSFPLVERQANEVDWWDMVCNVKKLINEKKEDGKVFWQNLAGYKRQEALRPYLSSEEDRKKGKKFARYQLGDLLLHLEKKHGEDWGKVYDEAWERIDKKVEGLSKHIKLEEERRSEDAQSKAALTDWLRAKASFVIEGLKEADKDEFCRCELKLQKWYGDLRGKPFAIEAENSILDISGFSKQYNCAFIWQKDGVKKLNLYLIINYFKGGKLRFKKIKPEAFEANRFYTVINKKSGEIVPMEVNFNFDDPNLIILPLAFGKRQGREFIWNDLLSLETGSLKLANGRVIEKTLYNRRTRQDEPALFVALTFERREVLDSSNIKPMNLIGVDRGENIPAVIALTDPEGCPLSRFKDSLGNPTHILRIGESYKEKQRTIQAKKEVEQRRAGGYSRKYASKAKNLADDMVRNTARDLLYYAVTQDAMLIFENLSRGFGRQGKRTFMAERQYTRMEDWLTAKLAYEGLPSKTYLSKTLAQYTSKTCSNCGFTITSADYDRVLEKLKKTATGWMTTINGKELKVEGQITYYNRYKRQNVVKDLSVELDRLSEESVNNDISSWTKGRSGEALSLLKKRFSHRPVQEKFVCLNCGFETHADEQAALNIARSWLFLRSQEYKKYQTNKTTGNTDKRAFVETWQSFYRKKLKEVWKPAV

SEQ ID NO: 27063 - protein, 978 aa, Artificial Sequence; identical to SEQ ID NO: 26958
  CasX Variant

SEQ ID NO: 27064 - protein, 978 aa, Artificial Sequence
  CasX Variant
QEIKRINKIRRRLVKDSNTKKAGKTGPMKTLLVRVMTPDLRERLENLRKKPENIPQPISNTSRANLNKLLTDYTEMKKAILHVYWEEFQKDPVGLMSRVAQPASKKIDQNKLKPEMDEKGNLTTAGFACSQCGQPLFVYKLEQVSEKGKAYTNYFGRCNVAEHEKLIKLAQLKPEKDSDEAVTYSLGKFGQRALDFYSIHVTKESTHPVKPLAQIAGNRYASYPVGKALSDACMGTIASFLSKYQDIIIEHQKVVKGNQKRLESLRELAGKENLEYPSVTLPPQPHTKEGVDAYNEVIARVRMWVNLNLWQKLKLSRDDAKPLLRLKGFPSFPLVERQANEVDWWDMVCNVKKLINEKKEDGKVFWQNLAGYKRQEALRPYLSSEEDRKKGKKFARYQLGDLLLHLEKKHGEDWGKVYDEAWERIDKKVEGLSKHIKLEEERRSEDAQSKAALTDWLRAKASFVIEGLKEADKDEFCRCELKLQKWYGDLRGKPFAIEAENSILDISGFSKQYNCAFIWQKDGVKKLNLYLIINYFKGGKLRFKKIKPEAFEANRFYTVINKKSGEIVPMEVNFNFDDPNLIILPLAFGKRQGREFIWNDLLSLETGSLKLANGRVIEKTLYNRRTRQDEPALFVALTFERREVLDSSNIKPMNLIGVDRGENIPAVIALTDPEGCPLSRFKDSLGNPTHILRIGESYKEKQRTIQAKKEVEQRRAGGYSRKYASKAKNLADDMVRNTARDLLYYAVTQDAMLIFENLSRGFGRQGKRTFMAERQYTRMEDWLTAKLAYEGLPSKTYLSKTLAQYTSKTCSNCGFTITSADYDRVLEKLKKTATGWMTTINGKELKVEGQITYYNRYKRQNVVKDLSVELDRLSEESVNNDISSWTKGRSGEALSLLKKRFSHRPVQEKFVCLNCGFETHADEQAALNIARSWLFLRSQEYKKYQTNKTTGNTDKRAFVETWQSFYRKKLKEVWKPAV

SEQ ID NO: 27065 - protein, 978 aa, Artificial Sequence
  CasX Variant
QEIKRINKIRRRLVKDSNTKKAGKTGPMKTLLVRVMTPDLRERLENLRKKPENIPQPISNTSRANLNKLLTDYTEMKKAILHVYWEEFQKDPVGLMSRVAQPASKKIDQNKLKPEMDEKGNLTTAGFACSQCGQPLFVYKLEQVSEKGKAYTNYFGRCNVAEHEKLIKLAQLKPEKDSDEAVTYSLGKFGQRALDFYSIHVTKESTHPVKPLAQIAGNRYASHPVGKALSDACMGTIASFLSKYQDIIIEHQKVVKGNQKRLESLRELAGKENLEYPSVTLPPQPHTKEGVDAYNEVIARVRMWVNLNLWQKLKLSRDDAKPLLRLKGFPSFPLVERQANEVDWWDMVCNVKKLINEKKEDGKVFWQNLAGYKRQEALRPYLSSEEDRKKGKKFARYQLGDLLLHLEKKHGEDWGKVYDEAWERIDKKVEGLSKHIKLEEERRSEDAQSKAALTDWLRAKASFVIEGLKEADKDEFCRCELKLQKWYGDLRGKPFAIEAENSILDISGFSKQYNCAFIWQKDGVKKLNLYLIINYFKGGKLRFKKIKPEAFEANRFYTVINKKSGEIVPMEVNFNFDDPNLIILPLAFGKRQGREFIWNDLLSLETGSLKLANGRVIEKTLYNRRTRQDEPALFVALTFERREVLDSSNIKPMNLIGVDRGENIPAVIALTDPEGCPLSRFKDSLGNPTHILRIGESYKEKQRTIQAKKEVEQRRAGGYSRKYASKAKNLADDMVRNTARDLLYYAVTQDAMLIFENLSRGFGRQGKRTFMAERQYTRMEDWLTAKLAYEGLPSKTYLSKTLAQYTSKTCSNCGFTITSADYDRVLEKLKKTATGWMTTINGKELKVEGQITYYNRYKRQNVVKDLSVELDRLSEESVNNDISSWTKGRSGEALSLLKKRFSHRPVQEKFVCLNCGFETHADEQAALNIARSWLFLRSQEYKKYQTNKTTGNTDKRAFVETWQSFYRKKLKEVWKPAV

SEQ ID NO: 27066 - protein, 979 aa, Artificial Sequence
  CasX Variant
QEIKRINKIRRRLVKDSNTKKAGKTRGPMKTLLVRVMTPDLRERLENLRKKPENIPQPISNTSRANLNKLLTDYTEMKKAILHVYWEEFQKDPVGLMSRVAQPASKKIDQNKLKPEMDEKGNLTTAGFACSQCGQPLFVYKLEQVSEKGKAYTNYFGRCNVAEHEKLIKLAQLKPEKDSDEAVTYSLGKFGQRALDFYSIHVTKESTHPVKPLAQIAGNRYASYPVGKALSDACMGTIASFLSKYQDIIIEHQKVVKGNQKRLESLRELAGKENLEYPSVTLPPQPHTKEGVDAYNEVIARVRMWVNLNLWQKLKLSRDDAKPLLRLKGFPSFPLVERQANEVDWWDMVCNVKKLINEKKEDGKVFWQNLAGYKRQEALRPYLSSEEDRKKGKKFARYQLGDLLLHLEKKHGEDWGKVYDEAWERIDKKVEGLSKHIKLEEERRSEDAQSKAALTDWLRAKASFVIEGLKEADKDEFCRCELKLQKWYGDLRGKPFAIEAENSILDISGFSKQYNCAFIWQKDGVKKLNLYLIINYFKGGKLRFKKIKPEAFEANRFYTVINKKSGEIVPMEVNFNFDDPNLIILPLAFGKRQGREFIWNDLLSLETGSLKLANGRVIEKTLYNRRTRQDEPALFVALTFERREVLDSSNIKPMNLIGVDRGENIPAVIALTDPEGCPLSRFKDSLGNPTHILRIGESYKEKQRTIQAKKEVEQRRAGGYSRKYASKAKNLADDMVRNTARDLLYYAVTQDAMLIFENLSRGFGRQGKRTFMAERQYTRMEDWLTAKLAYEGLPSKTYLSKTLAQYTSKTCSNCGFTITSADYDRVLEKLKKTATGWMTTINGKELKVEGQITYYNRYKRQNVVKDLSVELDRLSEESVNNDISSWTKGRSGEALSLLKKRFSHRPVQEKFVCLNCGFETHADEQAALNIARSWLFLRSQEYKKYQTNKTTGNTDKRAFVETWQSFYRKKLKEVWKPAV

SEQ ID NO: 27067 - protein, 979 aa, Artificial Sequence
  CasX Variant
QEIKRINKIRRRLVKDSNTKKAGKTRGPMKTLLVRVMTPDLRERLENLRKKPENIPQPISNTSRANLNKLLTDYTEMKKAILHVYWEEFQKDPVGLMSRVAQPASKKIDQNKLKPEMDEKGNLTTAGFACSQCGQPLFVYKLEQVSEKGKAYTNYFGRCNVAEHEKLIKLAQLKPEKDSDEAVTYSLGKFGQRALDFYSIHVTKESTHPVKPLAQIAGNRYASHPVGKALSDACMGTIASFLSKYQDIIIEHQKVVKGNQKRLESLRELAGKENLEYPSVTLPPQPHTKEGVDAYNEVIARVRMWVNLNLWQKLKLSRDDAKPLLRLKGFPSFPLVERQANEVDWWDMVCNVKKLINEKKEDGKVFWQNLAGYKRQEALRPYLSSEEDRKKGKKFARYQLGDLLLHLEKKHGEDWGKVYDEAWERIDKKVEGLSKHIKLEEERRSEDAQSKAALTDWLRAKASFVIEGLKEADKDEFCRCELKLQKWYGDLRGKPFAIEAENSILDISGFSKQYNCAFIWQKDGVKKLNLYLIINYFKGGKLRFKKIKPEAFEANRFYTVINKKSGEIVPMEVNFNFDDPNLIILPLAFGKRQGREFIWNDLLSLETGSLKLANGRVIEKTLYNRRTRQDEPALFVALTFERREVLDSSNIKPMNLIGVDRGENIPAVIALTDPEGCPLSRFKDSLGNPTHILRIGESYKEKQRTIQAKKEVEQRRAGGYSRKYASKAKNLADDMVRNTARDLLYYAVTQDAMLIFENLSRGFGRQGKRTFMAERQYTRMEDWLTAKLAYEGLPSKTYLSKTLAQYTSKTCSNCGFTITSADYDRVLEKLKKTATGWMTTINGKELKVEGQITYYNRYKRQNVVKDLSVELDRLSEESVNNDISSWTKGRSGEALSLLKKRFSHRPVQEKFVCLNCGFETHADEQAALNIARSWLFLRSQEYKKYQTNKTTGNTDKRAFVETWQSFYRKKLKEVWKPAV

SEQ ID NO: 27068 - protein, 978 aa, Artificial Sequence
  CasX Variant
QEIKRINKIRRRLVKDSNTKKAGKTGPMKTLLVRVMTPDLRERLENLRKKPENIPQPISNTSRANLNKLLTDYTEMKKAILHVYWEEFQKDPVGLMSRVAQPASKKIDQNKLKPEMDEKGNLTTAGFACSQCGQPLFVYKLEQVSEKGKAYTNYFGRCNVAEHEKLIKLAQLKPEKDSDEAVTYSLGKFGQRALDFYSIHVTKESTHPVKPLAQIAGNRYASHPVGKALSGACMGTIASFLSKYQDIIIEHQKVVKGNQKRLESLRELAGKENLEYPSVTLPPQPHTKEGVDAYNEVIARVRMWVNLNLWQKLKLSRDDAKPLLRLKGFPSFPLVERQANEVDWWDMVCNVKKLINEKKEDGKVFWQNLAGYKRQEALRPYLSSEEDRKKGKKFARYQLGDLLLHLEKKHGEDWGKVYDEAWERIDKKVEGLSKHIKLEEERRSEDAQSKAALTDWLRAKASFVIEGLKEADKDEFCRCELKLQKWYGDLRGKPFAIEAENSILDISGFSKQYNCAFIWQKDGVKKLNLYLIINYFKGGKLRFKKIKPEAFEANRFYTVINKKSGEIVPMEVNFNFDDPNLIILPLAFGKRQGREFIWNDLLSLETGSLKLANGRVIEKTLYNRRTRQDEPALFVALTFERREVLDSSNIKPMNLIGVDRGENIPAVIALTDPEGCPLSRFKDSLGNPTHILRIGESYKEKQRTIQAKKEVEQRRAGGYSRKYASKAKNLADDMVRNTARDLLYYAVTQDAMLIFENLSRGFGRQGKRTFMAERQYTRMEDWLTAKLAYEGLPSKTYLSKTLAQYTSKTCSNCGFTITSADYDRVLEKLKKTATGWMTTINGKELKVEGQITYYNRYKRQNVVKDLSVELDRLSEESVNNDISSWTKGRSGEALSLLKKRFSHRPVQEKFVCLNCGFETHADEQAALNIARSWLFLRSQEYKKYQTNKTTGNTDKRAFVETWQSFYRKKLKEVWKPAV

SEQ ID NO: 27069 - protein, 979 aa, Artificial Sequence
  CasX Variant
QEIKRINKIRRRLVKDSNTKKAGKTGPMKTLLVRVMTPDLRERLENLRKKPENIPQPISNTSRANLNKLLTDYTEMKKAILHVYWEEFQKDPVGLMSRVAQPASKKIDQNKLKPEMDEKGNLTTAGFACSQCGQPLFVYKLEQVSEKGKAYTNYFGRCNVAEHEKLILLAQLKPEKDSDEAVTYSLGKFGQRALDFYSIHVTKESTHPVKPLAQIAGNRYASGPVGKALSDACMGTIASFLSKYQDIIIEHQKVVKGNQKRLESLRELAGKENLEYPSVTLPPQPHTKEGVDAYNEVIARVRMWVNLNLWQKLKLSRDDAKPLLRLKGFPSFPLVERQANEVDWWDMVCNVKKLINEKKEDGKVFWQNLAGYKRQEALRPYLSSEEDRKKGKKFARYQLGDLLLHLEKKHGEDWGKVYDEAWERIDKKVEGLSKHIKLEEERRSEDAQSKAALTDWLRAKASFVIEGLKEADKDEFCRCELKLQKWYGDLRGKPFAIEAENSILDISGFSKQYNCAFIWQKDGVKKLNLYLIINYFKGGKLRFKKIKPEAFEANRFYTVINKKSGEIVPMEVNFNFDDPNLIILPLAFGKRQGREFIWNDLLSLETGSLKLANGRVIEKTLYNARRTRQDEPALFVALTFERREVLDSSNIKPMNLIGVDRGENIPAVIALTDPEGCPLSRFKDSLGNPTHILRIGESYKEKQRTIQAKKEVEQRRAGGYSRKYASKAKNLADDMVRNTARDLLYYAVTQDAMLIFENLSRGFGRQGKRTFMAERQYTRMEDWLTAKLAYEGLPSKTYLSKTLAQYTSKTCSNCGFTITSADYDRVLEKLKKTATGWMTTINGKELKVEGQITYYNRYKRQNVVKDLSVELDRLSEESVNNDISSWTKGRSGEALSLLKKRFSHRPVQEKFVCLNCGFETHADEQAALNIARSWLFLRSQEYKKYQTNKTTGNTDKRAFVETWQSFYRKKLKEVWKPAV

SEQ ID NO: 27070 - protein, 978 aa, Artificial Sequence
  CasX Variant
QEIKRINKIRRRLVKDSNTKKAGKTGPMKTLLVRVMTPDLRERLENLRKKPENIPQPISNTSRANLNKLLTDYTEMKKAILHVYWEEFQVDPVGLMSRVAQPASKKIDQNKLKPEMDEKGNLTTAGFACSQCGQPLFVYKLEQVSEKGKAYTNYFGRCNVAEHEKLILLAQLKPEKDSDEAVTYSLGKFGQRALDFYSIHVTKESTHPVKPLAQIAGNRYASGPVGKALSDACMGTIASFLSKYQDIIIEHQKVVKGNQKRLESLRELAGKENLEYPSVTLPPQPHTKEGVDAYNEVIARVRMWVNLNLWQKLKLSRDDAKPLLRLKGFPSFPLVERQANEVDWWDMVCNVKKLINEKKEDGKVFWQNLAGYKRQEALRPYLSSEEDRKKGKKFARYQLGDLLLHLEKKHGEDWGKVYDEAWERIDKKVEGLSKHIKLEEERRSEDAQSKAALTDWLRAKASFVIEGLKEADKDEFCRCELKLQKWYGDLRGKPFAIEAENSILDISGFSKQYNCAFIWQKDGVKKLNLYLIINYFKGGKLRFKKIKPEAFEANRFYTVINKKSGEIVPMEVNFNFDDPNLIILPLAFGKRQGREFIWNDLLSLETGSLKLANGRVIEKTLYNRRTRQDEPALFVALTFERREVLDSSNIKPMNLIGVDRGENIPAVIALTDPEGCPLSRFKDSLGNPTHILRIGESYKEKQRTIQAKKEVEQRRAGGYSRKYASKAKNLADDMVRNTARDLLYYAVTQDAMLIFENLSRGFGRQGKRTFMAERQYTRMEDWLTAKLAYEGLPSKTYLSKTLAQYTSKTCSNCGFTITSADYDRVLEKLKKTATGWMTTINGKELKVEGQITYYNRYKRQNVVKDLSVELDRLSEESVNNDISSWTKGRSGEALSLLKKRFSHRPVQEKFVCLNCGFETHADEQAALNIARSWLFLRSQEYKKYQTNKTTGNTDKRAFVETWQSFYRKKLKEVWKPAV

SEQ ID NO: 27071 - protein, 979 aa, Artificial Sequence
  CasX Variant
QEIKRINKIRRRLVKDSNTKKAGKTGPMKTLLVRVMTPDLRERLENLRKKPENIPQPISNTSRANLNKLLTDYTEMKKAILHVYWEGEFQKDPVGLMSRVAQPASKKIDQNKLKPEMDEKGNLTTAGFACSQCGQPLFVYKLEQVSEKGKAYTNYFGRCNVAEHEKLILLAQLKPEKDSDEAVTYSLGKFGQRALDFYSIHVTKESTHPVKPLAQIAGNRYASGPVGKALSDACMGTIASFLSKYQDIIIEHQKVVKGNQKRLESLRELAGKENLEYPSVTLPPQPHTKEGVDAYNEVIARVRMWVNLNLWQKLKLSRDDAKPLLRLKGFPSFPLVERQANEVDWWDMVCNVKKLINEKKEDGKVFWQNLAGYKRQEALRPYLSSEEDRKKGKKFARYQLGDLLLHLEKKHGEDWGKVYDEAWERIDKKVEGLSKHIKLEEERRSEDAQSKAALTDWLRAKASFVIEGLKEADKDEFCRCELKLQKWYGDLRGKPFAIEAENSILDISGFSKQYNCAFIWQKDGVKKLNLYLIINYFKGGKLRFKKIKPEAFEANRFYTVINKKSGEIVPMEVNFNFDDPNLIILPLAFGKRQGREFIWNDLLSLETGSLKLANGRVIEKTLYNRRTRQDEPALFVALTFERREVLDSSNIKPMNLIGVDRGENIPAVIALTDPEGCPLSRFKDSLGNPTHILRIGESYKEKQRTIQAKKEVEQRRAGGYSRKYASKAKNLADDMVRNTARDLLYYAVTQDAMLIFENLSRGFGRQGKRTFMAERQYTRMEDWLTAKLAYEGLPSKTYLSKTLAQYTSKTCSNCGFTITSADYDRVLEKLKKTATGWMTTINGKELKVEGQITYYNRYKRQNVVKDLSVELDRLSEESVNNDISSWTKGRSGEALSLLKKRFSHRPVQEKFVCLNCGFETHADEQAALNIARSWLFLRSQEYKKYQTNKTTGNTDKRAFVETWQSFYRKKLKEVWKPAV

SEQ ID NO: 27072 - protein, 978 aa, Artificial Sequence
  CasX Variant
QEIKRINKIRRRLVKDSNTKKAGKTGPMKTLLVRVMTPDLRERLENLRKKPENIPQPISNTSRANLNKLLTDYTEMKKAILHVYWEEFQKDPVGLMSRVAQPASKKIDQNKLKPEMDEKGNLTTAGFACSQCGQPLFVYKLEQVSEKGKAYTNYFGRCNVAEHEKLILLAQLKPEKDSDEAVTYSLGKFGQRALDFYSIHVTKESTHPVKPLAQIAGNRYASGPVGKALSDACMGTIASFLSKYQDIIIEHQKVVKGNQKRLEHLRELAGKENLEYPSVTLPPQPHTKEGVDAYNEVIARVRMWVNLNLWQKLKLSRDDAKPLLRLKGFPSFPLVERQANEVDWWDMVCNVKKLINEKKEDGKVFWQNLAGYKRQEALRPYLSSEEDRKKGKKFARYQLGDLLLHLEKKHGEDWGKVYDEAWERIDKKVEGLSKHIKLEEERRSEDAQSKAALTDWLRAKASFVIEGLKEADKDEFCRCELKLQKWYGDLRGKPFAIEAENSILDISGFSKQYNCAFIWQKDGVKKLNLYLIINYFKGGKLRFKKIKPEAFEANRFYTVINKKSGEIVPMEVNFNFDDPNLIILPLAFGKRQGREFIWNDLLSLETGSLKLANGRVIEKTLYNRRTRQDEPALFVALTFERREVLDSSNIKPMNLIGVDRGENIPAVIALTDPEGCPLSRFKDSLGNPTHILRIGESYKEKQRTIQAKKEVEQRRAGGYSRKYASKAKNLADDMVRNTARDLLYYAVTQDAMLIFENLSRGFGRQGKRTFMAERQYTRMEDWLTAKLAYEGLPSKTYLSKTLAQYTSKTCSNCGFTITSADYDRVLEKLKKTATGWMTTINGKELKVEGQITYYNRYKRQNVVKDLSVELDRLSEESVNNDISSWTKGRSGEALSLLKKRFSHRPVQEKFVCLNCGFETHADEQAALNIARSWLFLRSQEYKKYQTNKTTGNTDKRAFVETWQSFYRKKLKEVWKPAV

SEQ ID NO: 27073 - protein, 979 aa, Artificial Sequence
  CasX Variant
QEIKRINKIRRRLVKDSNTKKAGKTGPMKTLLVRVMTPDLRERLENLRKKPENIPQPISNTSRANLNKLLTDYTEMKKAILHVYWEEFQKDPVGLMSRVAQPASKKIDQNKLKPEMDEKGNLTTAGFACSQCGQPLFVYKLEQVSEKGKAYTNYFGRCNVAEHEKLILLAQLKPEKDSDEAVTYSLGKFGQRALDFYSIHVTKESTHPVKPLAQICAGNRYASGPVGKALSDACMGTIASFLSKYQDIIIEHQKVVKGNQKRLESLRELAGKENLEYPSVTLPPQPHTKEGVDAYNEVIARVRMWVNLNLWQKLKLSRDDAKPLLRLKGFPSFPLVERQANEVDWWDMVCNVKKLINEKKEDGKVFWQNLAGYKRQEALRPYLSSEEDRKKGKKFARYQLGDLLLHLEKKHGEDWGKVYDEAWERIDKKVEGLSKHIKLEEERRSEDAQSKAALTDWLRAKASFVIEGLKEADKDEFCRCELKLQKWYGDLRGKPFAIEAENSILDISGFSKQYNCAFIWQKDGVKKLNLYLIINYFKGGKLRFKKIKPEAFEANRFYTVINKKSGEIVPMEVNFNFDDPNLIILPLAFGKRQGREFIWNDLLSLETGSLKLANGRVIEKTLYNRRTRQDEPALFVALTFERREVLDSSNIKPMNLIGVDRGENIPAVIALTDPEGCPLSRFKDSLGNPTHILRIGESYKEKQRTIQAKKEVEQRRAGGYSRKYASKAKNLADDMVRNTARDLLYYAVTQDAMLIFENLSRGFGRQGKRTFMAERQYTRMEDWLTAKLAYEGLPSKTYLSKTLAQYTSKTCSNCGFTITSADYDRVLEKLKKTATGWMTTINGKELKVEGQITYYNRYKRQNVVKDLSVELDRLSEESVNNDISSWTKGRSGEALSLLKKRFSHRPVQEKFVCLNCGFETHADEQAALNIARSWLFLRSQEYKKYQTNKTTGNTDKRAFVETWQSFYRKKLKEVWKPAV

SEQ ID NO: 27074 - protein, 976 aa, Artificial Sequence
  CasX Variant
QEIKRINKIRRRLVKDSNTKKAGKTGPMKTLLVRVMTPDLRERLENLRKKPENIPQPISNTSRANLNKLLTDYTEMKKAILHVYWEEFQKDPVGLMSRVAQPASKKIDQNKLKPEMDEKGNLTTAGFACSQCGQPLFVYKLEQVSEKGKAYTNYFGRCNVAEHEKLILLAQLKPEKDSDEAVTYSLGKFGQRALDFYSIHVTKESTHPVKPLAQIAGNRYASGPVGKALSDACMGTIASFLSKYQDIIIEHQKVVKGNQKRLESLRELAGKENLEYPSVTLPPQPHTKEGVDAYNEVIARVRMWVNLNLWQKLKLSRDDAKPLLRLKGFPSFPLVERQANEVDWWVCNVKKLINEKKEDGKVFWQNLAGYKRQEALRPYLSSEEDRKKGKKFARYQLGDLLLHLEKKHGEDWGKVYDEAWERIDKKVEGLSKHIKLEEERRSEDAQSKAALTDWLRAKASFVIEGLKEADKDEFCRCELKLQKWYGDLRGKPFAIEAENSILDISGFSKQYNCAFIWQKDGVKKLNLYLIINYFKGGKLRFKKIKPEAFEANRFYTVINKKSGEIVPMEVNFNFDDPNLIILPLAFGKRQGREFIWNDLLSLETGSLKLANGRVIEKTLYNRRTRQDEPALFVALTFERREVLDSSNIKPMNLIGVDRGENIPAVIALTDPEGCPLSRFKDSLGNPTHILRIGESYKEKQRTIQAKKEVEQRRAGGYSRKYASKAKNLADDMVRNTARDLLYYAVTQDAMLIFENLSRGFGRQGKRTFMAERQYTRMEDWLTAKLAYEGLPSKTYLSKTLAQYTSKTCSNCGFTITSADYDRVLEKLKKTATGWMTTINGKELKVEGQITYYNRYKRQNVVKDLSVELDRLSEESVNNDISSWTKGRSGEALSLLKKRFSHRPVQEKFVCLNCGFETHADEQAALNIARSWLFLRSQEYKKYQTNKTTGNTDKRAFVETWQSFYRKKLKEVWKPAV

SEQ ID NO: 27075 - protein, 978 aa, Artificial Sequence
  CasX Variant
QEIKRINKIRRRLVKDSNTKKAGKTGPMKTLLVRVMTPDLRERLENLRKKPENIPQPISNTSRANLNKLLTDYTEMKKAILHVYWEEFQKDPVGLMSRVAQPASKKIDQNKLKPEMDEKGNLTTAGFACSQCGQPLFVYKLEQVSEKGKAYTNYFGRCNVAEHEKLILLAQLKPEKDSDEAVTYSLGKFGQRALDFYSIHVTKESTHPVKPLAQIAGNRYASGPVGKALSDACMGTIASFLSKYQDIIIEHQKVVKGNQKRLESLRELAGKENLEYPSVTLPPQPHTKEGVDAYNEVIARVRMWVNLNLWQKLKLSRDDAKPLLRLKGFPSFPLVERQANEVDWWDMVCNVKKLINEKKEDGKVFWQNLAGYKRQEALRPYLSSEEDRKKGKKFARYQLGDLLLHLEKKHGEDWGKVYDEAWERIDKKVEGLSKHIKLEEERRSEDAQSKAALTDWLRAKASFVIEGLKEADKDEFCRCELKLQKWYGDLRGKPFAIEAENSILDISGFSKQYNCAFIWQKDGVKKLNLYLIINYFGGGKLRFKKIKPEAFEANRFYTVINKKSGEIVPMEVNFNFDDPNLIILPLAFGKRQGREFIWNDLLSLETGSLKLANGRVIEKTLYNRRTRQDEPALFVALTFERREVLDSSNIKPMNLIGVDRGENIPAVIALTDPEGCPLSRFKDSLGNPTHILRIGESYKEKQRTIQAKKEVEQRRAGGYSRKYASKAKNLADDMVRNTARDLLYYAVTQDAMLIFENLSRGFGRQGKRTFMAERQYTRMEDWLTAKLAYEGLPSKTYLSKTLAQYTSKTCSNCGFTITSADYDRVLEKLKKTATGWMTTINGKELKVEGQITYYNRYKRQNVVKDLSVELDRLSEESVNNDISSWTKGRSGEALSLLKKRFSHRPVQEKFVCLNCGFETHADEQAALNIARSWLFLRSQEYKKYQTNKTTGNTDKRAFVETWQSFYRKKLKEVWKPAV

SEQ ID NO: 27076 - protein, 979 aa, Artificial Sequence
  CasX Variant
QEIKRINKIRRRLVKDSNTKKAGKTGPMKTLLVRVMTPDLRERLENLRKKPENIPQPISNTSRANLNKLLTDYTEMKKAILHVYWEEFQKDPVGLMSRVAQPASKKIDQNKLKPEMDEKGNLTTAGFACSQCGQPLFVYKLEQVSEKGKAYTNYFGRCNVAEHEKLILLAQLKPEKDSDEAVTYSLGKFGQRALDFYSIHVTKESTHPVKPLAQIAGNRYASGPVGKALSDACMGTIASFLSKYQDIIIEHQKVVKGNQKRLESLRELAGKENLEYPSVTLPPQPHTKEGVDAYNEVIARVRMWVNLNLWQKLKLSRDDAKPLLRLKGFPSFPLVERQANEVDWWDMVCNVKKLINEKKEDGKVFWQNLAGYKRQEALRPYLSSEEDRKKGKKFARYQLGDLLLHLEKKHGEDWGKLVYDEAWERIDKKVEGLSKHIKLEEERRSEDAQSKAALTDWLRAKASFVIEGLKEADKDEFCRCELKLQKWYGDLRGKPFAIEAENSILDISGFSKQYNCAFIWQKDGVKKLNLYLIINYFKGGKLRFKKIKPEAFEANRFYTVINKKSGEIVPMEVNFNFDDPNLIILPLAFGKRQGREFIWNDLLSLETGSLKLANGRVIEKTLYNRRTRQDEPALFVALTFERREVLDSSNIKPMNLIGVDRGENIPAVIALTDPEGCPLSRFKDSLGNPTHILRIGESYKEKQRTIQAKKEVEQRRAGGYSRKYASKAKNLADDMVRNTARDLLYYAVTQDAMLIFENLSRGFGRQGKRTFMAERQYTRMEDWLTAKLAYEGLPSKTYLSKTLAQYTSKTCSNCGFTITSADYDRVLEKLKKTATGWMTTINGKELKVEGQITYYNRYKRQNVVKDLSVELDRLSEESVNNDISSWTKGRSGEALSLLKKRFSHRPVQEKFVCLNCGFETHADEQAALNIARSWLFLRSQEYKKYQTNKTTGNTDKRAFVETWQSFYRKKLKEVWKPAV

SEQ ID NO: 27077 - protein, 979 aa, Artificial Sequence
  CasX Variant
QEIKRINKIRRRLVKDSNTKKAGKTGPMKTLLVRVMTPDLRERLENLRKKPENIPQPISNTSRANLNKLLTDYTEMKKAILHVYWEEFQKDPVGLMSRVAQPASKKIDQNKLKPEMDEKGNLTTAGFACSQCGQPLFVYKLEQVSEKGKAYTNYFGRCNVAEHEKLILLAQLKPEKDSDEAVTYSLGKFGQRALDFYSIHVTKESTHPVKPLAQIAGNRYASGPVGKALSDACMGTIASFLSKYQDIIIEHQKVVKGNQKRLESLRELAGKENLEYPSVTLPPQPHTKEGVDAYNEVIARVRMWVNLNLWQKLKLSRDDAKPLLRLKGQFPSFPLVERQANEVDWWDMVCNVKKLINEKKEDGKVFWQNLAGYKRQEALRPYLSSEEDRKKGKKFARYQLGDLLLHLEKKHGEDWGKVYDEAWERIDKKVEGLSKHIKLEEERRSEDAQSKAALTDWLRAKASFVIEGLKEADKDEFCRCELKLQKWYGDLRGKPFAIEAENSILDISGFSKQYNCAFIWQKDGVKKLNLYLIINYFKGGKLRFKKIKPEAFEANRFYTVINKKSGEIVPMEVNFNFDDPNLIILPLAFGKRQGREFIWNDLLSLETGSLKLANGRVIEKTLYNRRTRQDEPALFVALTFERREVLDSSNIKPMNLIGVDRGENIPAVIALTDPEGCPLSRFKDSLGNPTHILRIGESYKEKQRTIQAKKEVEQRRAGGYSRKYASKAKNLADDMVRNTARDLLYYAVTQDAMLIFENLSRGFGRQGKRTFMAERQYTRMEDWLTAKLAYEGLPSKTYLSKTLAQYTSKTCSNCGFTITSADYDRVLEKLKKTATGWMTTINGKELKVEGQITYYNRYKRQNVVKDLSVELDRLSEESVNNDISSWTKGRSGEALSLLKKRFSHRPVQEKFVCLNCGFETHADEQAALNIARSWLFLRSQEYKKYQTNKTTGNTDKRAFVETWQSFYRKKLKEVWKPAV

SEQ ID NO: 27078 - protein, 978 aa, Artificial Sequence
  CasX Variant
QEIKRINKIRRRLVKDSNTKKAGKTGPMKTLLVRVMTPDLRERLENLRKKPENIPQPISNTSRANLNKLLTDYTEMKKAILHVYWEEFQKDPVGLMSRVAQPASKKIDQNKLKPEMDEKGNLTTAGFACSQCGQPLFVYKLEQVSEKGKAYTNYFGRCNVAEHEKLILLAQLKPEKDSDEAVTYSLGKFGQRALDFYSIHVTKESTHPVKPLAQIAGNRYASGPVGKALSDACMGTIASFLSKYQDIIIEHQKVVKGNQKRLESLRELAGKENLEYPSVTLPPQPHTKEGVDAYNEVIARVRMWVNLNLWQKLKLSRDDAKPLLRLKGFPSFPLVERQANEVSWWDMVCNVKKLINEKKEDGKVFWQNLAGYKRQEALRPYLSSEEDRKKGKKFARYQLGDLLLHLEKKHGEDWGKVYDEAWERIDKKVEGLSKHIKLEEERRSEDAQSKAALTDWLRAKASFVIEGLKEADKDEFCRCELKLQKWYGDLRGKPFAIEAENSILDISGFSKQYNCAFIWQKDGVKKLNLYLIINYFKGGKLRFKKIKPEAFEANRFYTVINKKSGEIVPMEVNFNFDDPNLIILPLAFGKRQGREFIWNDLLSLETGSLKLANGRVIEKTLYNRRTRQDEPALFVALTFERREVLDSSNIKPMNLIGVDRGENIPAVIALTDPEGCPLSRFKDSLGNPTHILRIGESYKEKQRTIQAKKEVEQRRAGGYSRKYASKAKNLADDMVRNTARDLLYYAVTQDAMLIFENLSRGFGRQGKRTFMAERQYTRMEDWLTAKLAYEGLPSKTYLSKTLAQYTSKTCSNCGFTITSADYDRVLEKLKKTATGWMTTINGKELKVEGQITYYNRYKRQNVVKDLSVELDRLSEESVNNDISSWTKGRSGEALSLLKKRFSHRPVQEKFVCLNCGFETHADEQAALNIARSWLFLRSQEYKKYQTNKTTGNTDKRAFVETWQSFYRKKLKEVWKPAV

SEQ ID NO: 27079 - protein, 978 aa, Artificial Sequence
  CasX Variant
QEIKRINKIRRRLVKDSNTKKAGKTGPMKTLLVRVMTPDLRERLENLRKKPENIPQPISNTSRANLNKLLTDYTEMKKAILHVYWEEFQKDPVGLMSRVAQPASKKIDQNKLKPEMDEKGNLTTAGFACSQCGQPLFVYKLEQVSEKGKAYTNYFGRCNVAEHEKLILLAQLKPEKDSDEAVTYSLGKFGQRALDFYSIHVTKESTHPVKPLAQIAGNRYASGPVGKALSDACMGTIASFLSKYQDIIIEHQKVVKGNQKRLESLRELAGKENLEYPSVTLPPQPHTKEGVDAYNEVIARVRMWVNLNLWQKLKLSRDDAKPLLRLKGFPSFPLVERQANEVDWWDMVCNVKKLINEKKEDGKVFWQNLAGYKRQEALRPYLSSEEDRKKGKKFARYQLGDLLLHLEKKHGEDWGKVYDEAWERIDKKVEGLSKHIKLEEERRSEDAQSKAALTDWLREKASFVIEGLKEADKDEFCRCELKLQKWYGDLRGKPFAIEAENSILDISGFSKQYNCAFIWQKDGVKKLNLYLIINYFKGGKLRFKKIKPEAFEANRFYTVINKKSGEIVPMEVNFNFDDPNLIILPLAFGKRQGREFIWNDLLSLETGSLKLANGRVIEKTLYNRRTRQDEPALFVALTFERREVLDSSNIKPMNLIGVDRGENIPAVIALTDPEGCPLSRFKDSLGNPTHILRIGESYKEKQRTIQAKKEVEQRRAGGYSRKYASKAKNLADDMVRNTARDLLYYAVTQDAMLIFENLSRGFGRQGKRTFMAERQYTRMEDWLTAKLAYEGLPSKTYLSKTLAQYTSKTCSNCGFTITSADYDRVLEKLKKTATGWMTTINGKELKVEGQITYYNRYKRQNVVKDLSVELDRLSEESVNNDISSWTKGRSGEALSLLKKRFSHRPVQEKFVCLNCGFETHADEQAALNIARSWLFLRSQEYKKYQTNKTTGNTDKRAFVETWQSFYRKKLKEVWKPAV

SEQ ID NO: 27080 - protein, 978 aa, Artificial Sequence
  CasX Variant
QEIKRINKIRRRLVKDSNTKKAGKTGPMKTLLVRVMTPDLRERLENLRKKPENIPQPISNTSRANLNKLLTDYTEMKKAILHVYWEEFQKDPVGLMSRVAQPASKKIDQNKLKPEMDEKGNLTTAGFACSQCGQPLFVYKLEQVSEKGKAYTNYFGRCNVAEHEKLILLAQLKPEKDSDEAVTYSLGKFGQRALDFYSIHVTKESTHPVKPLAQIAGNRYASGPVGKALSDACMGTIASFLSKYQDIIIEHQKVVKGNQKRLESLRELAGKENLEYPSVTLPPQPHTKEGVDAYNEVIARVRMWVNLNLWQKLKLSRDDAKPLLRLKGFPSFPLVERQANEVDWWDMVCNVKKLINEKKEDGKVFWQNLAGYKRQEALRPYLSSEEDRKKGKKFARYQLGDLLLHLEKKHGEDWGKVYDEAWERIDKKVEGLSKHIKLEEERRSEDAQSKAALTDWLRAKASFVIEGLKEADKDEFCRCELKLQKWYGDLRGKPFAIEAENSILDISGFSKQYNCAFIWQKDGVKKLNLYLIINYFKGGKLRFKKIKPEAFEANRFYTVINKKSGEIVPMEVNFNFDDPNLIILPLAFGKRQGREFIWNDLLSLETGSLKLANGRVIEKTTYNRRTRQDEPALFVALTFERREVLDSSNIKPMNLIGVDRGENIPAVIALTDPEGCPLSRFKDSLGNPTHILRIGESYKEKQRTIQAKKEVEQRRAGGYSRKYASKAKNLADDMVRNTARDLLYYAVTQDAMLIFENLSRGFGRQGKRTFMAERQYTRMEDWLTAKLAYEGLPSKTYLSKTLAQYTSKTCSNCGFTITSADYDRVLEKLKKTATGWMTTINGKELKVEGQITYYNRYKRQNVVKDLSVELDRLSEESVNNDISSWTKGRSGEALSLLKKRFSHRPVQEKFVCLNCGFETHADEQAALNIARSWLFLRSQEYKKYQTNKTTGNTDKRAFVETWQSFYRKKLKEVWKPAV

SEQ ID NO: 27081 - protein, 978 aa, Artificial Sequence
  CasX Variant
QEIKRINKIRRRLVKDSNTKKAGKTGPMKTLLVRVMTPDLRERLENLRKKPENIPQPISNTSRANLNKLLTDYTEMKKAILHVYWEEFQKDPVGLMSRVAQPASKKIDQNKLKPEMDEKGNLTTAGFACSQCGQPLFVYKLEQVSEKGKAYTNYFGRCNVAEHEKLILLAQLKPEKDSDEAVTYSLGKFGQRALDFYSIHVTKESTHPVKPLAQIAGNRYASGPVGKALSDACMGTIASFLSKYQDIIIEHQKVVKGNQKRLESLRELAGKENLEYPSVTLPPQPHTKEGVDAYNEVIARVRMWVNLNLWQKLKLSRDDAKPLLRLKGFPSFPLVERQANEVDWWDMVCNVKKLINEKKEDGKVFWQNLAGYKRQEANRPYLSSEEDRKKGKKFARYQLGDLLLHLEKKHGEDWGKVYDEAWERIDKKVEGLSKHIKLEEERRSEDAQSKAALTDWLRAKASFVIEGLKEADKDEFCRCELKLQKWYGDLRGKPFAIEAENSILDISGFSKQYNCAFIWQKDGVKKLNLYLIINYFKGGKLRFKKIKPEAFEANRFYTVINKKSGEIVPMEVNFNFDDPNLIILPLAFGKRQGREFIWNDLLSLETGSLKLANGRVIEKTLYNRRTRQDEPALFVALTFERREVLDSSNIKPMNLIGVDRGENIPAVIALTDPEGCPLSRFKDSLGNPTHILRIGESYKEKQRTIQAKKEVEQRRAGGYSRKYASKAKNLADDMVRNTARDLLYYAVTQDAMLIFENLSRGFGRQGKRTFMAERQYTRMEDWLTAKLAYEGLPSKTYLSKTLAQYTSKTCSNCGFTITSADYDRVLEKLKKTATGWMTTINGKELKVEGQITYYNRYKRQNVVKDLSVELDRLSEESVNNDISSWTKGRSGEALSLLKKRFSHRPVQEKFVCLNCGFETHADEQAALNIARSWLFLRSQEYKKYQTNKTTGNTDKRAFVETWQSFYRKKLKEVWKPAV

SEQ ID NO: 27082 - protein, 978 aa, Artificial Sequence
  CasX Variant
QEIKRINKIRRRLVKDSNTKKAGKTGPMKTLLVRVMTPDLRERLENLRKKPENIPQPISNTSRANLNKLLTDYTEMKKAILHVYWEEFQKDPVGLMSRVAQPASKKIDQNKLKPEMDEKGNLTTAGFACSQCGQPLFVYKLEQVSEKGKAYTNYFGRCNVAEHEKLILLAQLKPEKDSDEAVTYSLGKFGQRALDFYSIHVTKESTHPVKPLAQIAGNRYASGPVGKALSDACMGTIASFLSKYQDIIIEHQKVVKGNQKRLESLRELAGKENLEYPSVTLPPQPHTKEGVDAYNEVIARVRMWVNLNLWQKLKLSRDDAKPLLRLKGFPSFPLVERQANEVDWWDMVCNVKKLINEKKEDGKVFWQNLAGYKRQEALRPYLSSEEDRKKGKKFARYQLGDLLLHLEKKHGEDWGKVYDEAWERIDKKVEGLSKHIKLEELRRSEDAQSKAALTDWLRAKASFVIEGLKEADKDEFCRCELKLQKWYGDLRGKPFAIEAENSILDISGFSKQYNCAFIWQKDGVKKLNLYLIINYFKGGKLRFKKIKPEAFEANRFYTVINKKSGEIVPMEVNFNFDDPNLIILPLAFGKRQGREFIWNDLLSLETGSLKLANGRVIEKTLYNRRTRQDEPALFVALTFERREVLDSSNIKPMNLIGVDRGENIPAVIALTDPEGCPLSRFKDSLGNPTHILRIGESYKEKQRTIQAKKEVEQRRAGGYSRKYASKAKNLADDMVRNTARDLLYYAVTQDAMLIFENLSRGFGRQGKRTFMAERQYTRMEDWLTAKLAYEGLPSKTYLSKTLAQYTSKTCSNCGFTITSADYDRVLEKLKKTATGWMTTINGKELKVEGQITYYNRYKRQNVVKDLSVELDRLSEESVNNDISSWTKGRSGEALSLLKKRFSHRPVQEKFVCLNCGFETHADEQAALNIARSWLFLRSQEYKKYQTNKTTGNTDKRAFVETWQSFYRKKLKEVWKPAV

SEQ ID NO: 27083 - protein, 976 aa, Artificial Sequence
  CasX Variant
QEIKRINKIRRRLVKDSNTKKAGKTGPMKTLLVRVMTPDLRERLENLRKKPENIPQPISNTSRANLNKLLTDYTEMKKAILHVYWEEFQKDPVGLMSRVAQPASKKIDQNKLKPEMDEKGNLTTAGFACSQCGQPLFVYKLEQVSEKGKAYTNYFGRCNVAEHEKLILLAQLKPEKDSDEAVTYSLGKFGQRALDFYSIHVTKESTHPVKPLAQIAGNRYASGPVGKALSDACMGTIASFLSKYQDIIIEHQKVVKGNQKRLESLRELAGKENLEYPSVTLPPQPHTKEGVDAYNEVIARVRMWVNLNLWQKLKLSRDDAKPLLRLKGFPSFPLVERQANEVDWWDMVCNVKKLINEKKEDGKVFWQNLAGYKRQEALRPYLSSEEDRKKGKKFARYQLGDLLLHLEKKHGEDWGKVYDEAWERIDKKVEGLSKHIKLEEERRSEDAQSKAALTDWLRAKASFVIEGLKEADKDERCELKLQKWYGDLRGKPFAIEAENSILDISGFSKQYNCAFIWQKDGVKKLNLYLIINYFKGGKLRFKKIKPEAFEANRFYTVINKKSGEIVPMEVNFNFDDPNLIILPLAFGKRQGREFIWNDLLSLETGSLKLANGRVIEKTLYNRRTRQDEPALFVALTFERREVLDSSNIKPMNLIGVDRGENIPAVIALTDPEGCPLSRFKDSLGNPTHILRIGESYKEKQRTIQAKKEVEQRRAGGYSRKYASKAKNLADDMVRNTARDLLYYAVTQDAMLIFENLSRGFGRQGKRTFMAERQYTRMEDWLTAKLAYEGLPSKTYLSKTLAQYTSKTCSNCGFTITSADYDRVLEKLKKTATGWMTTINGKELKVEGQITYYNRYKRQNVVKDLSVELDRLSEESVNNDISSWTKGRSGEALSLLKKRFSHRPVQEKFVCLNCGFETHADEQAALNIARSWLFLRSQEYKKYQTNKTTGNTDKRAFVETWQSFYRKKLKEVWKPAV

SEQ ID NO: 27084 - protein, 976 aa, Artificial Sequence
  CasX Variant
QEIKRINKIRRRLVKDSNTKKAGKTGPMKTLLVRVMTPDLRERLENLRKKPENIPQPISNTSRANLNKLLTDYTEMKKAILHVYWEEFQKDPVGLMSRVAQPASKKIDQNKLKPEMDEKGNLTTAGFACSQCGQPLFVYKLEQVSEKGKAYTNYFGRCNVAEHEKLILLAQLKPEKDSDEAVTYSLGKFGQRALDFYSIHVTKESTHPVKPLAQIAGNRYASGPVGKALSDACMGTIASFLSKYQDIIIEHQKVVKGNQKRLESLRELAGKENLEYPSVTLPPQPHTKEGVDAYNEVIARVRMWVNLNLWQKLKLSRDDAKPLLRLKGFPSFPLVERQANEVDWWDMVCNVKKLINEKKEDGKVFWQNLAGYKRALRPYLSSEEDRKKGKKFARYQLGDLLLHLEKKHGEDWGKVYDEAWERIDKKVEGLSKHIKLEEERRSEDAQSKAALTDWLRAKASFVIEGLKEADKDEFCRCELKLQKWYGDLRGKPFAIEAENSILDISGFSKQYNCAFIWQKDGVKKLNLYLIINYFKGGKLRFKKIKPEAFEANRFYTVINKKSGEIVPMEVNFNFDDPNLIILPLAFGKRQGREFIWNDLLSLETGSLKLANGRVIEKTLYNRRTRQDEPALFVALTFERREVLDSSNIKPMNLIGVDRGENIPAVIALTDPEGCPLSRFKDSLGNPTHILRIGESYKEKQRTIQAKKEVEQRRAGGYSRKYASKAKNLADDMVRNTARDLLYYAVTQDAMLIFENLSRGFGRQGKRTFMAERQYTRMEDWLTAKLAYEGLPSKTYLSKTLAQYTSKTCSNCGFTITSADYDRVLEKLKKTATGWMTTINGKELKVEGQITYYNRYKRQNVVKDLSVELDRLSEESVNNDISSWTKGRSGEALSLLKKRFSHRPVQEKFVCLNCGFETHADEQAALNIARSWLFLRSQEYKKYQTNKTTGNTDKRAFVETWQSFYRKKLKEVWKPAV

SEQ ID NO: 27085 - protein, 978 aa, Artificial Sequence
  CasX Variant
QEIKRINKIRRRLVKDSNTKKAGKTGPMKTLLVRVMTPDLRERLENLRKKPENIPQPISNTSRANLNKLLTDYTEMKKAILHVYWEEFQKDPVGLMSRVAQPASKKIDQNKLKPEMDEKGNLTTAGFACSQCGQPLFVYKLEQVSEKGKAYTNYFGRCNVAEHEKLILLAQLKPEKDSDEAVTYSLGKFGQRALDFYSIHVTKESTHPVKPLAQIAGNRYASGPVGKALSDACMGTIASFLSKYQDIIIEHQKVVKGNQKRLESLRELAGKENLEYPSVTLPPQPHTKEGVDAYNEVIARVRMWVNLNLWQKLKLSRDDAKPLLRLKGFPSFPLVERQANEVDWWDMVCNVKKLINEKKEDGKVFWQNLAGYKRQEALRPYLSSEEDRQKGKKFARYQLGDLLLHLEKKHGEDWGKVYDEAWERIDKKVEGLSKHIKLEEERRSEDAQSKAALTDWLRAKASFVIEGLKEADKDEFCRCELKLQKWYGDLRGKPFAIEAENSILDISGFSKQYNCAFIWQKDGVKKLNLYLIINYFKGGKLRFKKIKPEAFEANRFYTVINKKSGEIVPMEVNFNFDDPNLIILPLAFGKRQGREFIWNDLLSLETGSLKLANGRVIEKTLYNRRTRQDEPALFVALTFERREVLDSSNIKPMNLIGVDRGENIPAVIALTDPEGCPLSRFKDSLGNPTHILRIGESYKEKQRTIQAKKEVEQRRAGGYSRKYASKAKNLADDMVRNTARDLLYYAVTQDAMLIFENLSRGFGRQGKRTFMAERQYTRMEDWLTAKLAYEGLPSKTYLSKTLAQYTSKTCSNCGFTITSADYDRVLEKLKKTATGWMTTINGKELKVEGQITYYNRYKRQNVVKDLSVELDRLSEESVNNDISSWTKGRSGEALSLLKKRFSHRPVQEKFVCLNCGFETHADEQAALNIARSWLFLRSQEYKKYQTNKTTGNTDKRAFVETWQSFYRKKLKEVWKPAV

SEQ ID NO: 27086 - protein, 978 aa, Artificial Sequence
  CasX Variant
QEIKRLNKIRRRLVKDSNTKKAGKTGPMKTLLVRVMTPDLRERLENLRKKPENIPQPISNTSRANLNKLLTDYTEMKKAILHVYWEEFQKDPVGLMSRVAQPASKKIDQNKLKPEMDEKGNLTTAGFACSQCGQPLFVYKLEQVSEKGKAYTNYFGRCNVAEHEKLILLAQLKPEKDSDEAVTYSLGKFGQRALDFYSIHVTKESTHPVKPLAQIAGNRYASGPVGKALSDACMGTIASFLSKYQDIIIEHQKVVKGNQKRLESLRELAGKENLEYPSVTLPPQPHTKEGVDAYNEVIARVRMWVNLNLWQKLKLSRDDAKPLLRLKGFPSFPLVERQANEVDWWDMVCNVKKLINEKKEDGKVFWQNLAGYKRQEALRPYLSSEEDRKKGKKFARYQLGDLLLHLEKKHGEDWGKVYDEAWERIDKKVEGLSKHIKLEEERRSEDAQSKAALTDWLRAKASFVIEGLKEADKDEFCRCELKLQKWYGDLRGKPFAIEAENSILDISGFSKQYNCAFIWQKDGVKKLNLYLIINYFKGGKLRFKKIKPEAFEANRFYTVINKKSGEIVPMEVNFNFDDPNLIILPLAFGKRQGREFIWNDLLSLETGSLKLANGRVIEKTLYNRRTRQDEPALFVALTFERREVLDSSNIKPMNLIGVDRGENIPAVIALTDPEGCPLSRFKDSLGNPTHILRIGESYKEKQRTIQAKKEVEQRRAGGYSRKYASKAKNLADDMVRNTARDLLYYAVTQDAMLIFENLSRGFGRQGKRTFMAERQYTRMEDWLTAKLAYEGLPSKTYLSKTLAQYTSKTCSNCGFTITSADYDRVLEKLKKTATGWMTTINGKELKVEGQITYYNRYKRQNVVKDLSVELDRLSEESVNNDISSWTKGRSGEALSLLKKRFSHRPVQEKFVCLNCGFETHADEQAALNIARSWLFLRSQEYKKYQTNKTTGNTDKRAFVETWQSFYRKKLKEVWKPAV

SEQ ID NO: 27087 - protein, 978 aa, Artificial Sequence
  CasX Variant
QEIKRINKIRRRLVKDSNTKKAGKTGPMKTLLVRVMTPDLRERLENLRKKPENIPQPISNTSRANLNKLLTDYTEMKKAILHVYWEEFQKDPVGLMSRVAQPASKKIDQNKLKPEMDEKGNLTTAGFACSQCGQPLFVYKLEQVSEKGKAYTNYFGRCNVAEHEKLILLAQLKPEKDSDEAVTYSLGKFGQRALDFYSIHVTKESTHPVKPLAQIAGNRYASGPVGKALSDACMGTIASFLSKYQDIIIEHQKVVKGNQKRLESLRELAGKENLEYPSVTLPPQPHTKEGVDAYNEVIARVRMWVNLNLWQKLKLSRDDAKPLLRLKGFPSFPLVERQANEVDWWDMVCNVKKLINEKKEDGKVFWQNLAGYKRQEALRPYLSSEEDRKKGKKFARYQLGDLLLHLEKKHGEDWGKVYDEAWERIDKKVEGLSKHIKLEEERRSEDAQSKAALTDWLDAKASFVIEGLKEADKDEFCRCELKLQKWYGDLRGKPFAIEAENSILDISGFSKQYNCAFIWQKDGVKKLNLYLIINYFKGGKLRFKKIKPEAFEANRFYTVINKKSGEIVPMEVNFNFDDPNLIILPLAFGKRQGREFIWNDLLSLETGSLKLANGRVIEKTLYNRRTRQDEPALFVALTFERREVLDSSNIKPMNLIGVDRGENIPAVIALTDPEGCPLSRFKDSLGNPTHILRIGESYKEKQRTIQAKKEVEQRRAGGYSRKYASKAKNLADDMVRNTARDLLYYAVTQDAMLIFENLSRGFGRQGKRTFMAERQYTRMEDWLTAKLAYEGLPSKTYLSKTLAQYTSKTCSNCGFTITSADYDRVLEKLKKTATGWMTTINGKELKVEGQITYYNRYKRQNVVKDLSVELDRLSEESVNNDISSWTKGRSGEALSLLKKRFSHRPVQEKFVCLNCGFETHADEQAALNIARSWLFLRSQEYKKYQTNKTTGNTDKRAFVETWQSFYRKKLKEVWKPAV

SEQ ID NO: 27088 - protein, 976 aa, Artificial Sequence
  CasX Variant
QEIKRINKIRRRLVKDSNTKKAGKTGPMKTLLVRVMTPDLRERLENLRKKPENIPQPISNTSRANLNKLLTDYTEMKKAILHVYWEEFQKDPVGLMSRVAQPASKKIDQNKLKPEMDEKGNLTTAGFACSQCGQPLFVYKLEQVSEKGKAYTNYFGRCNVAEHEKLILLAQLKPEKDSDEAVTYSLGKFGQRALDFYSIHVTKESTHPVKPLAQIAGNRYASGPVGKALSDACMGTIASFLSKYQDIIIEHQKVVKGNQKRLESLRELAGKENLEYPSVTLPPQPHTKEGVDAYNEVIARVRMWVNLNLWQKLKLSRDDAKPLLRLKGFPSFPLVERQANEVDWWDMVCNVKKLINEKKEDGKVFWQNLAGYKRQEALRPYLSSEEDRKKGKKFARYQLGDLLLHLEKKHGEDWGKVYDEAWERIDKKVEGLSKHIKLEEERRSEDAQSKAALTDWLRAKASFVIEGLKEADKDEFCRCELKLQKWYGDLRGKPFAIEAENSDISGFSKQYNCAFIWQKDGVKKLNLYLIINYFKGGKLRFKKIKPEAFEANRFYTVINKKSGEIVPMEVNFNFDDPNLIILPLAFGKRQGREFIWNDLLSLETGSLKLANGRVIEKTLYNRRTRQDEPALFVALTFERREVLDSSNIKPMNLIGVDRGENIPAVIALTDPEGCPLSRFKDSLGNPTHILRIGESYKEKQRTIQAKKEVEQRRAGGYSRKYASKAKNLADDMVRNTARDLLYYAVTQDAMLIFENLSRGFGRQGKRTFMAERQYTRMEDWLTAKLAYEGLPSKTYLSKTLAQYTSKTCSNCGFTITSADYDRVLEKLKKTATGWMTTINGKELKVEGQITYYNRYKRQNVVKDLSVELDRLSEESVNNDISSWTKGRSGEALSLLKKRFSHRPVQEKFVCLNCGFETHADEQAALNIARSWLFLRSQEYKKYQTNKTTGNTDKRAFVETWQSFYRKKLKEVWKPAV

SEQ ID NO: 27089 - protein, 978 aa, Artificial Sequence
  CasX Variant
QEIKRINKIRRRLVKDSNTKKAGKTGPMKTLLVRVMTPDLRERLENLRKKPENIPQPISNTSRANLNKLLTDYTEMKKAILHVYWEEFQKDPVGLMSRVAQPASKKIDQNKLKPEMDEKGNLTTAGFACSQCGQPLFVYKLEQVSEKGKAYTNYVGRCNVAEHEKLILLAQLKPEKDSDEAVTYSLGKFGQRALDFYSIHVTKESTHPVKPLAQIAGNRYASGPVGKALSDACMGTIASFLSKYQDIIIEHQKVVKGNQKRLESLRELAGKENLEYPSVTLPPQPHTKEGVDAYNEVIARVRMWVNLNLWQKLKLSRDDAKPLLRLKGFPSFPLVERQANEVDWWDMVCNVKKLINEKKEDGKVFWQNLAGYKRQEALRPYLSSEEDRKKGKKFARYQLGDLLLHLEKKHGEDWGKVYDEAWERIDKKVEGLSKHIKLEEERRSEDAQSKAALTDWLRAKASFVIEGLKEADKDEFCRCELKLQKWYGDLRGKPFAIEAENSILDISGFSKQYNCAFIWQKDGVKKLNLYLIINYFKGGKLRFKKIKPEAFEANRFYTVINKKSGEIVPMEVNFNFDDPNLIILPLAFGKRQGREFIWNDLLSLETGSLKLANGRVIEKTLYNRRTRQDEPALFVALTFERREVLDSSNIKPMNLIGVDRGENIPAVIALTDPEGCPLSRFKDSLGNPTHILRIGESYKEKQRTIQAKKEVEQRRAGGYSRKYASKAKNLADDMVRNTARDLLYYAVTQDAMLIFENLSRGFGRQGKRTFMAERQYTRMEDWLTAKLAYEGLPSKTYLSKTLAQYTSKTCSNCGFTITSADYDRVLEKLKKTATGWMTTINGKELKVEGQITYYNRYKRQNVVKDLSVELDRLSEESVNNDISSWTKGRSGEALSLLKKRFSHRPVQEKFVCLNCGFETHADEQAALNIARSWLFLRSQEYKKYQTNKTTGNTDKRAFVETWQSFYRKKLKEVWKPAV

SEQ ID NO: 27090 - protein, 979 aa, Artificial Sequence
  CasX Variant
QEIKRINKIRRRLVKDSNTKKAGKTGPMKTLLVRVMTPDLRERLENLRKKPENIPQPISNTSRANLNKLLTDYTEMKKAILHVYWEEFQKDPVGLMSRVAQPASKKIDQNKLKPEMDEKGNLTTAGFACSQCGQPLFVYKLEQVSEKGKAYTNYFGRCNVAEHEKLILLAQLKPEKDSDEAVTYSLGKFGQRALDFYSIHVTKESTHPVKPLAQIAGNRYASGPVGKALSDACMGTIASFLSKYQDIIIEHQKVVKGNQKRLESLRELAGKENLEYPSVTLPPQPHTKEGVDAYNEVIARVRMWVNLNLWQKLKLSRDDAKPLLRLKGFPSFPLVERQANEVDWWDMVCNVKKLINGEKKEDGKVFWQNLAGYKRQEALRPYLSSEEDRKKGKKFARYQLGDLLLHLEKKHGEDWGKVYDEAWERIDKKVEGLSKHIKLEEERRSEDAQSKAALTDWLRAKASFVIEGLKEADKDEFCRCELKLQKWYGDLRGKPFAIEAENSILDISGFSKQYNCAFIWQKDGVKKLNLYLIINYFKGGKLRFKKIKPEAFEANRFYTVINKKSGEIVPMEVNFNFDDPNLIILPLAFGKRQGREFIWNDLLSLETGSLKLANGRVIEKTLYNRRTRQDEPALFVALTFERREVLDSSNIKPMNLIGVDRGENIPAVIALTDPEGCPLSRFKDSLGNPTHILRIGESYKEKQRTIQAKKEVEQRRAGGYSRKYASKAKNLADDMVRNTARDLLYYAVTQDAMLIFENLSRGFGRQGKRTFMAERQYTRMEDWLTAKLAYEGLPSKTYLSKTLAQYTSKTCSNCGFTITSADYDRVLEKLKKTATGWMTTINGKELKVEGQITYYNRYKRQNVVKDLSVELDRLSEESVNNDISSWTKGRSGEALSLLKKRFSHRPVQEKFVCLNCGFETHADEQAALNIARSWLFLRSQEYKKYQTNKTTGNTDKRAFVETWQSFYRKKLKEVWKPAV

SEQ ID NO: 27091 - protein, 978 aa, Artificial Sequence
  CasX Variant
QEIKRINKIRRRLVKDSNTKKAGKTGPMKTLLVRVMTPDLRERLENLRKKPENIPQPISNTSRANLNKLLTDYTEMKKAILHVYWEEFQKDPVGLMSRVAQPASKKIDQNKLKPEMDEKGNLTTAGFACSQCGQPLFVYKLEQVSEKGKAYTNYFGRCNVAEHEKLILLAQLKPEKDSDEAVTYSLGKFGQRALDFYSIHVTKESTHPVKPLAQIAGNRFASGPVGKALSDACMGTIASFLSKYQDIIIEHQKVVKGNQKRLESLRELAGKENLEYPSVTLPPQPHTKEGVDAYNEVIARVRMWVNLNLWQKLKLSRDDAKPLLRLKGFPSFPLVERQANEVDWWDMVCNVKKLINEKKEDGKVFWQNLAGYKRQEALRPYLSSEEDRKKGKKFARYQLGDLLLHLEKKHGEDWGKVYDEAWERIDKKVEGLSKHIKLEEERRSEDAQSKAALTDWLRAKASFVIEGLKEADKDEFCRCELKLQKWYGDLRGKPFAIEAENSILDISGFSKQYNCAFIWQKDGVKKLNLYLIINYFKGGKLRFKKIKPEAFEANRFYTVINKKSGEIVPMEVNFNFDDPNLIILPLAFGKRQGREFIWNDLLSLETGSLKLANGRVIEKTLYNRRTRQDEPALFVALTFERREVLDSSNIKPMNLIGVDRGENIPAVIALTDPEGCPLSRFKDSLGNPTHILRIGESYKEKQRTIQAKKEVEQRRAGGYSRKYASKAKNLADDMVRNTARDLLYYAVTQDAMLIFENLSRGFGRQGKRTFMAERQYTRMEDWLTAKLAYEGLPSKTYLSKTLAQYTSKTCSNCGFTITSADYDRVLEKLKKTATGWMTTINGKELKVEGQITYYNRYKRQNVVKDLSVELDRLSEESVNNDISSWTKGRSGEALSLLKKRFSHRPVQEKFVCLNCGFETHADEQAALNIARSWLFLRSQEYKKYQTNKTTGNTDKRAFVETWQSFYRKKLKEVWKPAV

SEQ ID NO: 27092 - protein, 978 aa, Artificial Sequence
  CasX Variant
QEIKRINKIRRRLVKDSNTKKAGKTGPMKTLLVRVMTPDLRERLENLRKKPENIPQPISNTSRANLNKLLTDYTEMKKAILHVYWEEFQKDPVGLMSRVAQPASKKIDQNKLKPEMDEKGNLTTAGFACSQCGQPLFVYKLEQVSEKGKAYTNYFGRCNVAEHEKLILLAQLKPEKDSDEAVTYSLGKFGQRALDFYSIHVTKESTHPVKPLAQIAGNRYASGPVGKALSDACMGTIASFLSKYQDIIIEHQKVVKGNQKRLESLRELAGKENLEYPSVTLPPQPHTKEGVDAYNEVIARVRMWVNLNLWQKLKLSRDDAKPLLRLKGFPSFPLVERQANEVDWWDMVCNVKKLINEKKEDGKVFWQNLAGYKRQEALRPYLSSEEDRKKGKKFARYQLGDLLLHLEKKHGEDWGKVYDEAWERIDKKVEGLSKHIKLEEERRSEDAQSKAALTDWLRAKASFVIEGLKEADKDEFCRCELKLQKWYGDLRGKPFAIEAENSILDISGFSKQYNCAFIWQKDGVKKLNLYLIINYFKGGKLRFKKIKPEAFEANRFYTVINKKSGEIVPMEVNFNFDDPNLIILPLAFGKRQGREFIWNDLLSLETGSLKLANGRVIEKTLYNRRTRQDEPALFVALTFERREVLDSSNIKPMNLIGVDRGENIPAVIALTDPEGCPLSRFKDSLGNPTHILRIGESYKEKQRTIQAKKEVEQRRAGGYSRKYASKAKNLADDMVRNTARDLLYYAVTQDAMLIFENLSRGFGRQGKRTFMAERQYTRMEDWYTAKLAYEGLPSKTYLSKTLAQYTSKTCSNCGFTITSADYDRVLEKLKKTATGWMTTINGKELKVEGQITYYNRYKRQNVVKDLSVELDRLSEESVNNDISSWTKGRSGEALSLLKKRFSHRPVQEKFVCLNCGFETHADEQAALNIARSWLFLRSQEYKKYQTNKTTGNTDKRAFVETWQSFYRKKLKEVWKPAV

SEQ ID NO: 27093 - protein, 979 aa, Artificial Sequence
  CasX Variant
QEIKRINKIRRRLVKDSNTKKAGKTGPMKTLLVRVMTPDLRERLENLRKKPENIPQPISNTSRANLNKLLTDYTEMKKAILHVYWEEFQKDPVGLMSRVAQPASKKIDQNKLKPEMDEKGNLTTAGFACSQCGQPLFVYKLEQVSEKGKAYTNYFGRCNVAEHEKLILLAQLKPEKDSDEAVTYSLGKFGQRALDFYSIHVTKESTHPVKPLAQIAGNRYASGPVGKALSDACMGTIASFLSKYQDIIIEHQKVVKGNQKRLESLRELAGKENLEYPSVTLPPQPHTKEGVDAYNEVIARVRMWVNLNLWQKLKLSRDDAKPLLRLKGFPSFPLVERQANEVDWWDMVPCNVKKLINEKKEDGKVFWQNLAGYKRQEALRPYLSSEEDRKKGKKFARYQLGDLLLHLEKKHGEDWGKVYDEAWERIDKKVEGLSKHIKLEEERRSEDAQSKAALTDWLRAKASFVIEGLKEADKDEFCRCELKLQKWYGDLRGKPFAIEAENSILDISGFSKQYNCAFIWQKDGVKKLNLYLIINYFKGGKLRFKKIKPEAFEANRFYTVINKKSGEIVPMEVNFNFDDPNLIILPLAFGKRQGREFIWNDLLSLETGSLKLANGRVIEKTLYNRRTRQDEPALFVALTFERREVLDSSNIKPMNLIGVDRGENIPAVIALTDPEGCPLSRFKDSLGNPTHILRIGESYKEKQRTIQAKKEVEQRRAGGYSRKYASKAKNLADDMVRNTARDLLYYAVTQDAMLIFENLSRGFGRQGKRTFMAERQYTRMEDWLTAKLAYEGLPSKTYLSKTLAQYTSKTCSNCGFTITSADYDRVLEKLKKTATGWMTTINGKELKVEGQITYYNRYKRQNVVKDLSVELDRLSEESVNNDISSWTKGRSGEALSLLKKRFSHRPVQEKFVCLNCGFETHADEQAALNIARSWLFLRSQEYKKYQTNKTTGNTDKRAFVETWQSFYRKKLKEVWKPAV

SEQ ID NO: 27094 - protein, 979 aa, Artificial Sequence
  CasX Variant
QEIKRINKIRRRLVKDSNTKKAGKTGPMKTLLVRVMTPDLRERLENLRKKPENIPQPISNTSRANLNKLLTDYTEMKKAILHVYWEEFQKDPVGLMSRVAQPASKKIDQNKLKPEMDEKGNLTTAGFACSQCGQPLFVYKLEQVSEKGKAYTNYFGRCNVAEHEKLILLAQLKPEKDSDEAVTYSLGKFGQRALDFYSIHVTKESTHPVKPLAQTIAGNRYASGPVGKALSDACMGTIASFLSKYQDIIIEHQKVVKGNQKRLESLRELAGKENLEYPSVTLPPQPHTKEGVDAYNEVIARVRMWVNLNLWQKLKLSRDDAKPLLRLKGFPSFPLVERQANEVDWWDMVCNVKKLINEKKEDGKVFWQNLAGYKRQEALRPYLSSEEDRKKGKKFARYQLGDLLLHLEKKHGEDWGKVYDEAWERIDKKVEGLSKHIKLEEERRSEDAQSKAALTDWLRAKASFVIEGLKEADKDEFCRCELKLQKWYGDLRGKPFAIEAENSILDISGFSKQYNCAFIWQKDGVKKLNLYLIINYFKGGKLRFKKIKPEAFEANRFYTVINKKSGEIVPMEVNFNFDDPNLIILPLAFGKRQGREFIWNDLLSLETGSLKLANGRVIEKTLYNRRTRQDEPALFVALTFERREVLDSSNIKPMNLIGVDRGENIPAVIALTDPEGCPLSRFKDSLGNPTHILRIGESYKEKQRTIQAKKEVEQRRAGGYSRKYASKAKNLADDMVRNTARDLLYYAVTQDAMLIFENLSRGFGRQGKRTFMAERQYTRMEDWLTAKLAYEGLPSKTYLSKTLAQYTSKTCSNCGFTITSADYDRVLEKLKKTATGWMTTINGKELKVEGQITYYNRYKRQNVVKDLSVELDRLSEESVNNDISSWTKGRSGEALSLLKKRFSHRPVQEKFVCLNCGFETHADEQAALNIARSWLFLRSQEYKKYQTNKTTGNTDKRAFVETWQSFYRKKLKEVWKPAV

SEQ ID NO: 27095 - protein, 978 aa, Artificial Sequence
  CasX Variant
QEIKRINKIRRRLVKDSNTKKAGKTGPMKTLLVRVMTPDLRERLENLRKKPENIPQPISNTSRANLNKLLTDYTEMKKAILHVYWEEFQKDPVGLMSRVAQPASKKIDQNKLKPEMDEKGNLTTAGFACSQCGQPLFVYKLEQVSEKGKAYTNYFGRCNVAEHEKLILLAQLKPEKDSDEAVTYSLGKFGQRALDFYSIHVTKESTHPVKPLAQIAGNRYASGPVGKALSDACMGTIASFLSKYQDIIIEHQKVVKGNQKRLESLRELAGKENLEYPSVTLPPQPHTKEGVDAYNEVIARVRMWVNLNLWQKLKLSRDDAKPLLRLKGFPSFPLVERQANEVDWWDMVCNVKKLINEKKEDGKVFWQNLAGYKRQEALRPYLSSEEDRKKGKKFARYQLGDLLLHLEKKHGEDWGKVYDEAWERIDKKVEGLSKHIKLEEERRSEDAQSKAALTDWLRAKASFVIEGLKEADKDEFCRCELKLQKWYGDLRGKPFAIEAENSILDISGFSKQYNCAFIWQKDGVKKLNLYLIINYFKGGKLRFKKIKPEAFEANRFYTVINKKSGEIVPMEVNFNFDDPNLIILPLAFGKRQGREFIWNDLLSLETGSLKLANGRVIEKTLYNRRTRQDEPALFVALTFERREVLDSSNIKPMNLIGVDRGENIPAVIALTDPEGCPLSRFKDSLGNPTHILRIGESYKEKQRTIQAKKEVEQRRAGGYSRKYASKAKNLADDMVRNTARDLLYYAVTQDAMLIFENLSRGFGRQGKRTFMAERQYTRMEDWLTAKLAYEGLPSKTYLSKTLAQYTSKTCSNCGFTITSADYDRVLEKLKKTATGWMTTINGKELKVEGQITYYNRYKRQNVVKDLSVELDRLSEESVNNDISSWTKGRSGEALSLLKKRFSHRPCQEKFVCLNCGFETHADEQAALNIARSWLFLRSQEYKKYQTNKTTGNTDKRAFVETWQSFYRKKLKEVWKPAV

SEQ ID NO: 27096 - protein, 979 aa, Artificial Sequence
  CasX Variant
QEIKRINKIRRRLVKDSNTKKAGKTGPMKTLLVRVMTPDLRERLENLPRKKPENIPQPISNTSRANLNKLLTDYTEMKKAILHVYWEEFQKDPVGLMSRVAQPASKKIDQNKLKPEMDEKGNLTTAGFACSQCGQPLFVYKLEQVSEKGKAYTNYFGRCNVAEHEKLILLAQLKPEKDSDEAVTYSLGKFGQRALDFYSIHVTKESTHPVKPLAQIAGNRYASGPVGKALSDACMGTIASFLSKYQDIIIEHQKVVKGNQKRLESLRELAGKENLEYPSVTLPPQPHTKEGVDAYNEVIARVRMWVNLNLWQKLKLSRDDAKPLLRLKGFPSFPLVERQANEVDWWDMVCNVKKLINEKKEDGKVFWQNLAGYKRQEALRPYLSSEEDRKKGKKFARYQLGDLLLHLEKKHGEDWGKVYDEAWERIDKKVEGLSKHIKLEEERRSEDAQSKAALTDWLRAKASFVIEGLKEADKDEFCRCELKLQKWYGDLRGKPFAIEAENSILDISGFSKQYNCAFIWQKDGVKKLNLYLIINYFKGGKLRFKKIKPEAFEANRFYTVINKKSGEIVPMEVNFNFDDPNLIILPLAFGKRQGREFIWNDLLSLETGSLKLANGRVIEKTLYNRRTRQDEPALFVALTFERREVLDSSNIKPMNLIGVDRGENIPAVIALTDPEGCPLSRFKDSLGNPTHILRIGESYKEKQRTIQAKKEVEQRRAGGYSRKYASKAKNLADDMVRNTARDLLYYAVTQDAMLIFENLSRGFGRQGKRTFMAERQYTRMEDWLTAKLAYEGLPSKTYLSKTLAQYTSKTCSNCGFTITSADYDRVLEKLKKTATGWMTTINGKELKVEGQITYYNRYKRQNVVKDLSVELDRLSEESVNNDISSWTKGRSGEALSLLKKRFSHRPVQEKFVCLNCGFETHADEQAALNIARSWLFLRSQEYKKYQTNKTTGNTDKRAFVETWQSFYRKKLKEVWKPAV

SEQ ID NO: 27097 - protein, 978 aa, Artificial Sequence
  CasX Variant
QEIKRINKIRRRLVKDSNTKKAGKTGPMKTLLVRVMTPDLRERLENLRKKPENIPQPISNTSRANLNKLLTDYTEMKKAILHVYWEEFQKDPVGLMSRVAQPASKKIDQNKLKPEMDEKGNLTTAGFACSQCGQPLFVYKLEQVSEKGKAYTNYFGRCNVAEHEKLILLAQLKPEKDSDEAVTYSLGKFGQRALDFYSIHVTKESTHPVKPLAQIAGNRYASGPVGKALSDACMGTIASFLSKYQDIIIEHQKVVKGNQKRLESLRELAGKENLEYPSVTLPPQPHTKEGVDAYNEVIARVRMWVNLNLWQKLKLSRDDAKPLLRLKGFPSFPLVERQANEVDWWDMVCNVKKLINEKKEDGKVFWQNLAGYKRQEALRPYLSSEEDRKKGKKFARYQLGDLLLHLEKKHGEDWGKVYDEAWERIDKKVEGLSKHIKLEEERRSEDAQSKAALTDWLRAKASFVIEGLKEADKDEFCRCELKLQKWYGDLRGKPFAIEAENSILDISGFSKQYNCAFIWQKDGVKKLNLYLIINYFKGGKLRFKKIKPEAFEANRFYTVINKKSGEIVPMEVNFNFDDPNLIILPLAFGKRQGREFIWNDLLSLETGSLKLANGRVIEKTLYNRRTRQDEPALFVALTFERREVLDSSNIKPMNLIGVDRGENIPAVIALTDPEGCPLSRFKDSLGNPTHILRIGESYKEKQRTIQAKKEVEQRRAGGYSRKYASKAKNLADDMVRNTARDLLYYAVTQDAMLIFENLSRGFGRQGKRTFMAERQYTRMEDWLTAKLAYEGLPSKTYLSKTLAQYTSKTCSNCGFTITSADYDRVLEGLKKTATGWMTTINGKELKVEGQITYYNRYKRQNVVKDLSVELDRLSEESVNNDISSWTKGRSGEALSLLKKRFSHRPVQEKFVCLNCGFETHADEQAALNIARSWLFLRSQEYKKYQTNKTTGNTDKRAFVETWQSFYRKKLKEVWKPAV

SEQ ID NO: 27098 - protein, 977 aa, Artificial Sequence
  CasX Variant
QEIKRINKIRRRLVKDSNTKKAGKTGPMKTLLVRVMTPDLRERLENLRKKPENIPQPISNTSRANLNKLLTDYTEMKKAILHVYWEEFQKDPVGLMSRVAQPASKKIDQNKLKPEMDEKGNLTTAGFACSQCGQPLFVYKLEQVSEKGKAYTNYFGRCNVAEHEKLILLAQLKPEKDSDEAVTYSLGKFGQRALDFYSIHVTKESTHPVKPLAQIAGNRYASGPVGKALSDACMGTIASFLSKYQDIIIEHQKVVKGNQKRLESLRELAGKENLEYPSVTLPPQPHTKEGVDAYNEVIARVRMWVNLNLWQKLKLSRDDAKPLLRLKGFPSFPLVERQANEVDWWDMVCNVKKLINEKKEDGKVFWQNLAGYKRQEALRPYLSSEEDRKKGKKFARYQLGDLLLHLEKKHGEDWGKVYDEAWERIDKKVEGLSKHIKLEEERRSEDAQSKAALTDWLRAKASFVIEGLKEADKDEFCRCELKLQKWYGDLRGKPFAIEAENSILDISGFSKQYNCAFIWQKDGVKKLNLYLIINYFKGGKLRFKKIKPEAFEANRFYTVINKKSGEIVPMEVNFNFDDPNLIILPLAFGKRQGREFIWNDLLSLETGSLKLANGRVIEKTLYNRRTRQDEPALFVALTFERREVLDSSNIKPMNLIGVDRGENIPAVIALTDPEGCPLSRFKDSLGNPTHILRIGESYKEKQRTIQAKKEVEQRRAGGYSRKYASKAKNLADDMVRNTARDLLYYAVTQDAMLIFENLSRGFGRQGKRTFMAERQYTRMEDWLTAKLAYEGLPSKTYLSKTLAQTSKTCSNCGFTITSADYDRVLEKLKKTATGWMTTINGKELKVEGQITYYNRYKRQNVVKDLSVELDRLSEESVNNDISSWTKGRSGEALSLLKKRFSHRPVQEKFVCLNCGFETHADEQAALNIARSWLFLRSQEYKKYQTNKTTGNTDKRAFVETWQSFYRKKLKEVWKPAV

SEQ ID NO: 27099 - protein, 979 aa, Artificial Sequence
  CasX Variant
QEIKRINKIRRRLVKDSNTKKAGKTGPMKTLLVRVMTPDLRERLENLRKKPENIPQPISNTSRANLNKLLTDYTEMKKAILHVYWEEFQKDPVGLMSRVAQPASKKIDQNKLKPEMDEKGNLTTAGFACSQCGQPLFVYKLEQVSEKGKAYTNYFGRCNVAEHEKLILLAQLKPEKDSDEAVTYSLGKFGQRALDFYSIHVTKESTHPVKPLAQIAGNRYASGPVGKALSDACMGTIASFLSKYQDIIIEHQKVVKGNQKRLESLRELAGKENLEYPSVTLPPQPHTKEGVDAYNEVIARVRMWVNLNLWQKLKLSRDDAKPLLRLKGFPSFPLVERQANEVDWWDMVCNVKKLINEKKEDGKVFWQNLAGYKRQEALRPYLSSEEDRKKGKKFARYQLGDLLLHLEKKHGEDWGKVYDEAWERIDKKVEGLSKHIKLEEERRSEDAQSKAALTDWLRAKASFVIEGLKEADKDEFCRCELKLQKWYGDLRGKPFAIEAENSILDISGFSKQYNCAFIWQKDGVKKLNLYLIINYFKGGKLRFKKIKPEAFEANRFYTVINKKSGEIVPMEVNFNFDDPNLIILPLAFGKRQGREFIWNDLLSLETGSLKLANGRVIEKTLYNRRTRQDEPALFVALTFERREVLDSSNIKPMNLIGVDRGENIPAVIALTDPEGCPLSRFKDSLGNPTHILRIGESYKEKQRTIQAKKEVEQRRAGGYSRKYASKAKNLADDMVRNTARDLLYYAVTQDAMLIFENLSRGFGRQGKRTFMAERQYTRMEDWLTAKLAYEGLPSKTYLSKTLAQYTISKTCSNCGFTITSADYDRVLEKLKKTATGWMTTINGKELKVEGQITYYNRYKRQNVVKDLSVELDRLSEESVNNDISSWTKGRSGEALSLLKKRFSHRPVQEKFVCLNCGFETHADEQAALNIARSWLFLRSQEYKKYQTNKTTGNTDKRAFVETWQSFYRKKLKEVWKPAV

SEQ ID NO: 27100 - protein, 978 aa, Artificial Sequence
  CasX Variant
QEIKRINKIRRRLVKDSNTKKAGKTGPMKTLLVRVMTPDLRERLENLRKKPENIPQPISNTSRANLNKLLTDYTEMKKAILHVYWEEFQKDPVGLMSRVAQPASKKIDQNKLKPEMDEKGNLTTAGFACSQCGQPLFVYKLEQVSEKGKAYTNYFGRCNVAEHEKLILLAQLKPEKDSDEAVTYSLGKFGQRALDFYSIHVTKESTHPVKPLAQIAGNRYASGPVGKALSDACMGTIASFLSKYQDIIIEHQKVVKGNQKRLESLRELAGKENLEYPSVTLPPQPHTKEGVDAYNEVIARVRMWVNLNLWQKLKLSRDDAKPLLRLKGFPSFPLVERQANEVDWWDMVCNVKKLINEKKEDGKVFWQNLAGYKRQEALRPYLSSEEDRKKGKKFARYQLGDLLLHLEKKHGEDWGKVYDEAWERIDKKVEGLSKHIKLEEERRSEDAQSKAALTDWLRAKASFVIEGLKEADKDEFCRCELKLQKWYGDLRGKPFAIEAENSILDISGFSKQYNCAFIWQKDGVKKLNLYLIINYFKGGKLRFKKIKPEAFEANRFYTVINKKSGEIVPMEVNFNFDDPNLIILPLAFGKRQGREFIWNDLLSLETGSLKLANGRVIEKTLYNRRTRQDEPALFVALTFERREVLDSSNIKPMNLIGVDRGENIPAVIALTDPEGCPLSRFKDSLGNPTHILRIGESYKEKQRTIQAKKEVEQRRAGGYSRKYASKAKNLADDMVRNTARDLLYYAVTQDAMLIFENLSRGFGRQGKRTFMAERQYTRMEDWLTAKLAYEGLPSKTYLSKTLAQYTSKTKSNCGFTITSADYDRVLEKLKKTATGWMTTINGKELKVEGQITYYNRYKRQNVVKDLSVELDRLSEESVNNDISSWTKGRSGEALSLLKKRFSHRPVQEKFVCLNCGFETHADEQAALNIARSWLFLRSQEYKKYQTNKTTGNTDKRAFVETWQSFYRKKLKEVWKPAV

SEQ ID NO: 27101 - protein, 978 aa, Artificial Sequence
  CasX Variant
QEIKRINKIRRRLVKDSNTKKAGKTGPMKTLLVRVMTPDLRERLENLRKKPENIPQPISNTSRANLNKLLTDYTEMKKAILHVYWEEFQKDPVGLMSRVAQPASKKIDQNKLKPEMDEKGNLTTAGFACSQCGQPLFVYKLEQVSEKGKAYTNYFGRCNVAEHEKLILLAQLKPEKDSDEAVTYSLGKFGQRALDFYSIHVTKESTHPVKPLAQIAGNRYASGPVGKALSDACMGTIASFLSKYQDIIIEHQKVVKGNQKRLESLRELAGKENLEYPSVTLPPQPHTKEGVDAYNEVIARVRMWVNLNLWQKLKLSRDDAKPLLRLKGFPSFPLVERQANEVDWWDMVCNVKKLINEKKEDGKVFWQNLAGYKRQEALRPYLSSEEDRKKGKKFARYQLGDLLLHLEKKHGEDWGKVYDEAWERIDKKVEGLSKHIKLEEERRSEDAQSKAALTDWLRAKASFVIEGLKEADKDEFCRCELKLQKWYGDLRGKPFAIEAENSILDISGFSKQYNCAFIWQKDGVKKLNLYLIINYFKGGKLRFKKIKPEAFEANRFYTVINKKSGEIVPMEVNFNFDDPNLIILPLAFGKRQGREFIWNDLLSLETGSLKLANGRVIEKTLYNRRTRQDEPALFVALTFERREVLDSSNIKPMNLIGVDRGENIPAVIALTDPEGCPLSRFKDSLGNPTHILRIGESYKEKQRTIQAKKEVEQRRAGGYSRKYASKAKNLADDMVRNTARDLLYYAVTQDAMLIFENLSRGFGRQGKRTFMAERQYTRMEDWLTAKLAYEGLPSKTYLSKQLAQYTSKTCSNCGFTITSADYDRVLEKLKKTATGWMTTINGKELKVEGQITYYNRYKRQNVVKDLSVELDRLSEESVNNDISSWTKGRSGEALSLLKKRFSHRPVQEKFVCLNCGFETHADEQAALNIARSWLFLRSQEYKKYQTNKTTGNTDKRAFVETWQSFYRKKLKEVWKPAV

SEQ ID NO: 27102 - protein, 978 aa, Artificial Sequence
  CasX Variant
QEIKRINKIRRRLVKDSNTKKAGKTGPMKTLLVRVMTPDLRERLENLRKKPENIPQPISNTSRANLNKLLTDYTEMKKAILHVYWEEFQKDPVGLMSRVAQPASKKIDQNKLKPEMDEKGNLTTAGFACSQCGQPLFVYKLEQVSEKGKAYTNYFGRCNVAEHEKLILLAQLKPEKDSDEAVTYSLGKFGQRALDFYSIHVTKESTHPVKPLAQIAGNRYASGPVGKALSDACMGTIASFLSKYQDIIIEHQKVVKGNQKRLESLRELAGKENLEYPSVTLPPQPHTKEGVDAYNEVIARVRMWVNLNLWQKLKLSRDDAKPLLRLKGFPSFPLVERQANEVDWWDMVCNVKKLINEKKEDGKVFWQNLAGYKRQEALRPYLSSEEDRKKGKKFARYQLGDLLLHLEKKHGEDWGKVYDEAWERIDKKVEGLSKHIKLEEERRSEDAQSKAALTDWLRAKASFVIEGLKEADKDEFCRCELKLQKWYGDLRGKPFAIEAENSILDISGFSKQYNCAFIWQKDGVKKLNLYLIINYFKGGKLRFKKIKPEAFEANRFYTVINKKSGEIVPMEVNFNFDDPNLIILPLAFGKRQGREFIWNDLLSLETGSLKLANGRVIEKTLYNRRTRQDEPALFVALTFERREVLDSSNIKPMNLIGVDRGENIPAVIALTDPEGCPLSRFKDSLGNPTHILRIGESYKEKQRTIQAKKEVEQRRAGGYSRKYASKAKNLADDMVRNTARDLLYYAVTQDAMLIFENLSRGFGRQGKRTFMAERQYTRMEDWLTAKLAYEGLPSKTYLSKTLAQYYSKTCSNCGFTITSADYDRVLEKLKKTATGWMTTINGKELKVEGQITYYNRYKRQNVVKDLSVELDRLSEESVNNDISSWTKGRSGEALSLLKKRFSHRPVQEKFVCLNCGFETHADEQAALNIARSWLFLRSQEYKKYQTNKTTGNTDKRAFVETWQSFYRKKLKEVWKPAV

SEQ ID NO: 27103 - protein, 978 aa, Artificial Sequence
  CasX Variant
QEIKRINKIRRRLVKDSNTKKAGKTGPMKTLLVRVMTPDLRERLENLRKKPENIPQPISNTSRANLNKLLTDYTEMKKAILHVYWEEFQKDPVGLMSRVAQPASKKIDQNKLKPEMDEKGNLTTAGFACSQCGQPLFVYKLEQVSEKGKAYTNYFGRCNVAEHEKLILLAQLKPEKDSDEAVTYSLGKFGQRALDFYSIHVTKESTHPVKPLAQIAGNRYASGPVGKALSDACMGTIASFLSKYQDIIIEHQKVVKGNQKRLESLRELAGKENLEYPSVTLPPQPHTKEGVDAYNEVIARVRMWVNLNLWQKLKLSRDDAKPLLRLKGFPSFPLVERQANEVDWWDMVCNVKKLINEKKEDGKVFWQNLAGYKRQEALRPYLSSEEDRKKGKKFARYQLGDLLLHLEKKHGEDWGKVYDEAWERIDKKVEGLSKHIKLEEERRSEDAQSKAALTDWLRAKASFVIEGLKEADKDEFCRCELKLQKWYGDLRGKPFAIEAENSILDISGFSKQYNCAFIWQKDGVKKLNLYLIINYFKGGKLRFKKIKPEAFEANRFYTVINKKSGEIVPMEVNFNFDDPNLIILPLAFGKRQGREFIWNDLLSLETGSLKLANGRVIEKTLYNRRTRQDEPALFVALTFERREVLDSSNIKPMNLIGVDRGENIPAVIALTDPEGCPLSRFKDSLGNPTHILRIGESYKEKQRTIQAKKEVEQRRAGGYSRKYASKAKNLADDMVRNTARDLLYYAVTQDAMLIFENLSRGFGRQGKRTFMAERQYTRMEDWLTAKLAYEGLPSKTYLSKTLAKYTSKTCSNCGFTITSADYDRVLEKLKKTATGWMTTINGKELKVEGQITYYNRYKRQNVVKDLSVELDRLSEESVNNDISSWTKGRSGEALSLLKKRFSHRPVQEKFVCLNCGFETHADEQAALNIARSWLFLRSQEYKKYQTNKTTGNTDKRAFVETWQSFYRKKLKEVWKPAV

SEQ ID NO: 27104 - protein, 978 aa, Artificial Sequence
  CasX Variant
QEIKRINKIRRRLVKDSNTKKAGKTGPMKTLLVRVMTPDLRERLENLRKKPENIPQPISNTSRANLNKLLTDYTEMKKAILHVYWEEFQKDPVGLMSRVAQPASKKIDQNKLKPEMDEKGNLTTAGFACSQCGQPLFVYKLEQVSEKGKAYTNYFGRCNVAEHEKLILLAQLKPEKDSDEAVTYSLGKFGQRALDFYSIHVTKESTHPVKPLAQIAGNRYASGPVGKALSDACMGTIASFLSKYQDIIIEHQKVVKGNQKRLESLRELAGKENLEYPSVTLPPQPHTKEGVDAYNEVIARVRMWVNLNLWQKLKLSRDDAKPLLRLKGFPSFPLVERQANEVDWWDMVCNVKKLINEKKEDGKVFWQNLAGYKRQEALRPYLSSEEDRKKGKKFARYQLGDLLLHLEKKHGEDWGKVYDEAWERIDKKVEGLSKHIKLEEERRSEDAQSKAALTDWLRAKASFVIEGLKEADKDEFCRCELKLQKWYGDLRGKPFAIEAENSILDISGFSKQYNCAFIWQKDGVKKLNLYLIINYFKGGKLRFKKIKPEAFEANRFYTVINKKSGEIVPMEVNFNFDDPNLIILPLAFGKRQGREFIWNDLLSLETGSLKLANGRVIEKTLYNRRTRQDEPALFVALTFERREVLDSSNIKPMNLIGVDRGENIPAVIALTDPEGCPLSRFKDSLGNPTHILRIGESYKEKQRTIQAKKEVEQRRAGGYSRKYASKAKNLADDMVRNTARDLLYYAVTQDAMLIFENLSRGFGRQGKRTFMAERQYTRMEDWLTAKLAYEGLASKTYLSKTLAQYTSKTCSNCGFTITSADYDRVLEKLKKTATGWMTTINGKELKVEGQITYYNRYKRQNVVKDLSVELDRLSEESVNNDISSWTKGRSGEALSLLKKRFSHRPVQEKFVCLNCGFETHADEQAALNIARSWLFLRSQEYKKYQTNKTTGNTDKRAFVETWQSFYRKKLKEVWKPAV

SEQ ID NO: 27105 - protein, 979 aa, Artificial Sequence
  CasX Variant
QEIKRINKIRRRLVKDSNTKKAGKTGPMKTLLVRVMTPDLRERLENLRKKPENIPQPISNTSRANLNKLLTDYTEMKKAILHVYWEEFQKDPVGLMSRVAQPASKKIDQNKLKPEMDEKGNLTTAGFACSQCGQPLFVYKLEQVSEKGKAYTNYFGRCNVAEHEKLILLAQLKPEKDSDEAVTYSLGKFGQRALDFYSIHVTKESTHPVKPLAQIAGNRYASGPVGKALSDACMGTIASFLSKYQDIIIEHQKVVKGNQKRLESLRELAGKENLEYPSVTLPPQPHTKEGVDAYNEVIARVRMWVNLNLWQKLKLSRDDAKPLLRLKGFPSFPLVERQANEVDWWDMVCNVKKLINEKKEDGKVFWQNLAGYKRQEALRPYLSSEEDRKKGKKFARYQLGDLLLHLEKKHGEDWGKVYDEAWERIDKKVEGLSKHIKLEEERRSEDAQSKAALTDWLRAKASFVIEGLKEADKDEFCRCELKLQKWYGDLRGKPFAIEAENSILDISGFSKQYNCAFIWQKDGVKKLNLYLIINYFKGGKLRFKKIKPEAFEANRFYTVINKKSGEIVPMEVNFNFDDPNLIILPLAFGKRQGREFIWNDLLSLETGSLKLANGRVIEKTLYNRRTRQDEPALFVALTFERREVLDSSNIKPMNLIGVDRGENIPAVIALTDPEGCPLSRFKDSLGNPTHILRIGESYKEKQRTIQAKKEVEQRRAGGYSRKYASKAKNLADDMVRNTARDLLYYAVTQDAMLIFENLSRGFGRQGKRTFMAERQYTRMEDWLTAKLAYEGLPSKTYLSKTLLAQYTSKTCSNCGFTITSADYDRVLEKLKKTATGWMTTINGKELKVEGQITYYNRYKRQNVVKDLSVELDRLSEESVNNDISSWTKGRSGEALSLLKKRFSHRPVQEKFVCLNCGFETHADEQAALNIARSWLFLRSQEYKKYQTNKTTGNTDKRAFVETWQSFYRKKLKEVWKPAV

SEQ ID NO: 27106 - protein, 977 aa, Artificial Sequence
  CasX Variant
QEIKRINKIRRRLVKDSNTKKAGKTGPMKTLLVRVMTPDLRERLENLRKKPENIPQPISNTSRANLNKLLTDYTEMKKAILHVYWEEFQKDPVGLMSRVAQPASKKIDQNKLKPEMDEKGNLTTAGFACSQCGQPLFVYKLEQVSEKGKAYTNYFGRCNVAEHEKLILLAQLKPEKDSDEAVTYSLGKFGQRALDFYSIHVTKESTHPVKPLAQIAGNRYASGPVGKALSDACMGTIASFLSKYQDIIIEHQKVVKGNQKRLESLRELAGKENLEYPSVTLPPQPHTKEGVDAYNEVIARVRMWVNLNLWQKLKLSRDDAKPLLRLKGFPSFPLVERQANEVDWWDMVCNVKKLINEKKEDGKVFWQNLAGYKRQEALRPYLSSEEDRKKGKKFARYQLGDLLLHLEKKHGEDWGKVYDEAWERIDKKVEGLSKHIKLEEERRSEDAQSKAALTDWLRAKASFVIEGLKEADKDEFCRCELKLQKWYGDLRGKPFAIEAENSILDISGFSKQYNCAFIWQKDGVKKLNLYLIINYFKGGKLRFKKIKPEAFEANRFYTVINKKSGEIVPMEVNFNFDDPNLIILPLAFGKRQGREFIWNDLLSLETGSLKLANGRVIEKTLYNRRTRQDEPALFVALTFERREVLDSSNIKPMNLIGVDRGENIPAVIALTDPEGCPLSRFKDSLGNPTHILRIGESYKEKQRTIQAKKEVEQRRAGGYSRKYASKAKNLADDMVRNTARDLLYYAVTQDAMLIFENLSRGFGRQGKRTFMAERQYTRMEDWLTAKLAYEGLPSKTYLSKTAQYTSKTCSNCGFTITSADYDRVLEKLKKTATGWMTTINGKELKVEGQITYYNRYKRQNVVKDLSVELDRLSEESVNNDISSWTKGRSGEALSLLKKRFSHRPVQEKFVCLNCGFETHADEQAALNIARSWLFLRSQEYKKYQTNKTTGNTDKRAFVETWQSFYRKKLKEVWKPAV

SEQ ID NO: 27107 - protein, 979 aa, Artificial Sequence
  CasX Variant
QEIKRINKIRRRLVKDSNTKKAGKTGPMKTLLVRVMTPDLRERLENLRKKPENIPQPISNTSRANLNKLLTDYTEMKKAILHVYWEEFQKDPVGLMSRVAQPASKKIDQNKLKPEMDEKGNLTTAGFACSQCGQPLFVYKLEQVSEKGKAYTNYFGRCNVAEHEKLILLAQLKPEKDSDEAVTYSLGKFGQRALDFYSIHVTKESTHPVKPLAQIAGNRYASGPVGKALSDACMGTIASFLSKYQDIIIEHQKVVKGNQKRLESLRELAGKENLEYPSVTLPPQPHTKEGVDAYNEVIARVRMWVNLNLWQKLKLSRDDAKPLLRLKGFPSFPLVERQANEVDWWDMVCNVKKLINEKKEDGKVFWQNLAGYKRQEALRPYLSSEEDRKKGKKFARYQLGDLLLHLEKKHGEDWGKVYDEAWERIDKKVEGLSKHIKLEEERRSEDAQSKAALTDWLRAKASFVIEGLKEADKDEFCRCELKLQKWYGDLRGKPFAIEAENSILDISGFSKQYNCAFIWQKDGVKKLNLYLIINYFKGGKLRFKKIKPEAFEANRFYTVINKKSGEIVPMEVNFNFDDPNLIILPLAFGKRQGREFIWNDLLSLETGSLKLANGRVIEKTLYNRRTRQDEPALFVALTFERREVLDSSNIKPMNLIGVDRGENIPAVIALTDPEGCPLSRFKDSLGNPTHILRIGESYKEKQRTIQAKKEVEQRRAGGYSRKYASKAKNLADDMVRNTARDLLYYAVTQDAMLIFENLSRGFGRQGKRTFMAERQYTRMEDWLTAKLAYEGLPSKTYLSKTLAQYTSKTCSNCGFTWITSADYDRVLEKLKKTATGWMTTINGKELKVEGQITYYNRYKRQNVVKDLSVELDRLSEESVNNDISSWTKGRSGEALSLLKKRFSHRPVQEKFVCLNCGFETHADEQAALNIARSWLFLRSQEYKKYQTNKTTGNTDKRAFVETWQSFYRKKLKEVWKPAV

SEQ ID NO: 27108 - protein, 979 aa, Artificial Sequence
  CasX Variant
QEIKRINKIRRRLVKDSNTKKAGKTGPMKTLLVRVMTPDLRERLENLRKKPENIPQPISNTSRANLNKLLTDYTEMKKAILHVYWEEFQKDPVGLMSRVAQPASKKIDQNKLKPEMDEKGNLTTAGFACSQCGQPLFVYKLEQVSEKGKAYTNYFGRCNVAEHEKLILLAQLKPEKDSDEAVTYSLGKFGQRALDFYSIHVTKESTHPVKPLAQIAGNRYASGPVGKALSDACMGTIASFLSKYQDIIIEHQKVVKGNQKRLESLRELAGKENLEYPSVTLPPQPHTKEGVDAYNEVIARVRMWVNLNLWQKLKLSRDDAKPLLRLKGFPSFPLVERQANEVDWWDMVCNVKKLINEKKEDGKVFWQNLAGYKRQEALRPYLSSEEDRKKGKKFARYQLGDLLLHLEKKHGEDWGKVYDEAWERIDKKVEGLSKHIKLEEERRSEDAQSKAALTDWLRAKASFVIEGLKEADKDEFCRCELKLQKWYGDLRGKPFAIEAENSILDISGFSKQYNCAFIWQKDGVKKLNLYLIINYFKGGKLRFKKIKPEAFEANRFYTVINKKSGEIVPMEVNFNFDDPNLIILPLAFGKRQGREFIWNDLLSLETGSLKLANGRVIEKTLYNRRTRQDEPALFVALTFERREVLDSSNIKPMNLIGVDRGENIPAVIALTDPEGCPLSRFKDSLGNPTHILRIGESYKEKQRTIQAKKEVEQRRAGGYSRKYASKAKNLADDMVRNTARDLLYYAVTQDAMLIFENLSRGFGRQGKRTFMAERQYTRMEDWLTAKLAYEGLPSKTYLSKHTLAQYTSKTCSNCGFTITSADYDRVLEKLKKTATGWMTTINGKELKVEGQITYYNRYKRQNVVKDLSVELDRLSEESVNNDISSWTKGRSGEALSLLKKRFSHRPVQEKFVCLNCGFETHADEQAALNIARSWLFLRSQEYKKYQTNKTTGNTDKRAFVETWQSFYRKKLKEVWKPAV

SEQ ID NO: 27109 - protein, 978 aa, Artificial Sequence
  CasX Variant
QEIKRINKIRRRLVKDSNTKKAGKTGPMKTLLVRVMTPDLRERLENLRKKPENIPQPISNTSRANLNKLLTDYTEMKKAILHVYWEEFQKDPVGLMSRVAQPASKKIDQNKLKPEMDEKGNLTTAGFACSQCGQPLFVYKLEQVSEKGKAYTNYFGRCNVAEHEKLILLAQLKPEKDSDEAVTYSLGKFGQRALDFYSIHVTKESTHPVKPLAQIAGNRYASGPVGKALSDACMGTIASFLSKYQDIIIEHQKVVKGNQKRLESLRELAGKENLEYPSVTLPPQPHTKEGVDAYNEVIARVRMWVNLNLWQKLKLSRDDAKPLLRLKGFPSFPLVERQANEVDWWDMVCNVKKLINEKKEDGKVFWQNLAGYKRQEALRPYLSSEEDRKKGKKFARYQLGDLLLHLEKKHGEDWGKVYDEAWERIDKKVEGLSKHIKLEEERRSEDAQSKAALTDWLRAKASFVIEGLKEADKDEFCRCELKLQKWYGDLRGKPFAIEAENSILDISGFSKQYNCAFIWQKDGVKKLNLYLIINYFKGGKLRFKKIKPEAFEANRFYTVINKKSGEIVPMEVNFNFDDPNLIILPLAFGKRQGREFIWNDLLSLETGSLKLANGRVIEKTLYNRRTRQDEPALFVALTFERREVLDSSNIKPMNLIGVDRGENIPAVIALTDPEGCPLSRFKDSLGNPTHILRIGESYKEKQRTIQAKKEVEQRRAGGYSRKYASKAKNLADDMVRNTARDLLYYAVTQDAMLIFENLSRGFGRQGKRTFMAERQYTRMEDWLTAKLAYEGLPSKTYLSKTLAQYTSKPCSNCGFTITSADYDRVLEKLKKTATGWMTTINGKELKVEGQITYYNRYKRQNVVKDLSVELDRLSEESVNNDISSWTKGRSGEALSLLKKRFSHRPVQEKFVCLNCGFETHADEQAALNIARSWLFLRSQEYKKYQTNKTTGNTDKRAFVETWQSFYRKKLKEVWKPAV

SEQ ID NO: 27110 - protein, 979 aa, Artificial Sequence
  CasX Variant
QEIKRINKIRRRLVKDSNTKKAGKTGPMKTLLVRVMTPDLRERLENLRKKPENIPQPISNTSRANLNKLLTDYTEMKKAILHVYWEEFQKDPVGLMSRVAQPASKKIDQNKLKPEMDEKGNLTTAGFACSQCGQPLFVYKLEQVSEKGKAYTNYFGRCNVAEHEKLILLAQLKPEKDSDEAVTYSLGKFGQRALDFYSIHVTKESTHPVKPLAQIAGNRYASGPVGKALSDACMGTIASFLSKYQDIIIEHQKVVKGNQKRLESLRELAGKENLEYPSVTLPPQPHTKEGVDAYNEVIARVRMWVNLNLWQKLKLSRDDAKPLLRLKGFPSFPLVERQANEVDWWDMVCNVKKLINEKKEDGKVFWQNLAGYKRQEALRPYLSSEEDRKKGKKFARYQLGDLLLHLEKKHGEDWGKVYDEAWERIDKKVEGLSKHIKLEEERRSEDAQSKAALTDWLRAKASFVIEGLKEADKDEFCRCELKLQKWYGDLRGKPFAIEAENSILDISGFSKQYNCAFIWQKDGVKKLNLYLIINYFKGGKLRFKKIKPEAFEANRFYTVINKKSGEIVPMEVNFNFDDPNLIILPLAFGKRQGREFIWNDLLSLETGSLKLANGRVIEKTLYNRRTRQDEPALFVALTFERREVLDSSNIKPMNLIGVDRGENIPAVIALTDPEGCPLSRFKDSLGNPTHILRIGESYKEKQRTIQAKKEVEQRRAGGYSRKYASKAKNLADDMVRNTARDLLYYAVTQDAMLIFENLSRGFGRQGKRTFMAERQYTRMEDWLTAKLAYEGLPSKTYLSKTLAAQYTSKTCSNCGFTITSADYDRVLEKLKKTATGWMTTINGKELKVEGQITYYNRYKRQNVVKDLSVELDRLSEESVNNDISSWTKGRSGEALSLLKKRFSHRPVQEKFVCLNCGFETHADEQAALNIARSWLFLRSQEYKKYQTNKTTGNTDKRAFVETWQSFYRKKLKEVWKPAV

SEQ ID NO: 27111 - protein, 979 aa, Artificial Sequence
  CasX Variant
QEIKRINKIRRRLVKDSNTKKAGKTGPMKTLLVRVMTPDLRERLENLRKKPENIPQPISNTSRANLNKLLTDYTEMKKAILHVYWEEFQKDPVGLMSRVAQPASKKIDQNKLKPEMDEKGNLTTAGFACSQCGQPLFVYKLEQVSEKGKAYTNYFGRCNVAEHEKLILLAQLKPEKDSDEAVTYSLGKFGQRALDFYSIHVTKESTHPVKPLAQIAGNRYASGPVGKALSDACMGTIASFLSKYQDIIIEHQKVVKGNQKRLESLRELAGKENLEYPSVTLPPQPHTKEGVDAYNEVIARVRMWVNLNLWQKLKLSRDDAKPLLRLKGFPSFPLVERQANEVDWWDMVCNVKKLINEKKEDGKVFWQNLAGYKRQEALRPYLSSEEDRKKGKKFARYQLGDLLLHLEKKHGEDWGKVYDEAWERIDKKVEGLSKHIKLEEERRSEDAQSKAALTDWLRAKASFVIEGLKEADKDEFCRCELKLQKWYGDLRGKPFAIEAENSILDISGFSKQYNCAFIWQKDGVKKLNLYLIINYFKGGKLRFKKIKPEAFEANRFYTVINKKSGEIVPMEVNFNFDDPNLIILPLAFGKRQGREFIWNDLLSLETGSLKLANGRVIEKTLYNRRTRQDEPALFVALTFERREVLDSSNIKPMNLIGVDRGENIPAVIALTDPEGCPLSRFKDSLGNPTHILRIGESYKEKQRTIQAKKEVEQRRAGGYSRKYASKAKNLADDMVRNTARDLLYYAVTQDAMLIFENLSRGFGRQGKRTFMAERQYTRMEDWLTAKLAYEGLPSKTYLSKTLAQYTSKTCSNCGGFTITSADYDRVLEKLKKTATGWMTTINGKELKVEGQITYYNRYKRQNVVKDLSVELDRLSEESVNNDISSWTKGRSGEALSLLKKRFSHRPVQEKFVCLNCGFETHADEQAALNIARSWLFLRSQEYKKYQTNKTTGNTDKRAFVETWQSFYRKKLKEVWKPAV

SEQ ID NO: 27112 - protein, 979 aa, Artificial Sequence
  CasX Variant
QEIKRINKIRRRLVKDSNTKKAGKTGPMKTLLVRVMTPDLRERLENLRKKPENIPQPISNTSRANLNKLLTDYTEMKKAILHVYWEEFQKDPVGLMSRVAQPASKKIDQNKLKPEMDEKGNLTTAGFACSQCGQPLFVYKLEQVSEKGKAYTNYFGRCNVAEHEKLILLAQLKPEKDSDEAVTYSLGKFGQRALDFYSIHVTKESTHPVKPLAQIAGNRYASGPVGKALSDACMGTIASFLSKYQDIIIEHQKVVKGNQKRLESLRELAGKENLEYPSVTLPPQPHTKEGVDAYNEVIARVRMWVNLNLWQKLKLSRDDAKPLLRLKGFPSFPLVERQANEVDWWDMVCNVKKLINEKKEDGKVFWQNLAGYKRQEALRPYLSSEEDRKKGKKFARYQLGDLLLHLEKKHGEDWGKVYDEAWERIDKKVEGLSKHIKLEEERRSEDAQSKAALTDWLRAKASFVIEGLKEADKDEFCRCELKLQKWYGDLRGKPFAIEAENSILDISGFSKQYNCAFIWQKDGVKKLNLYLIINYFKGGKLRFKKIKPEAFEANRFYTVINKKSGEIVPMEVNFNFDDPNLIILPLAFGKRQGREFIWNDLLSLETGSLKLANGRVIEKTLYNRRTRQDEPALFVALTFERREVLDSSNIKPMNLIGVDRGENIPAVIALTDPEGCPLSRFKDSLGNPTHILRIGESYKEKQRTIQAKKEVEQRRAGGYSRKYASKAKNLADDMVRNTARDLLYYAVTQDAMLIFENLSRGFGRQGKRTFMAERQYTRMEDWLTAKLAYEGLPSKTYLSKTLFAQYTSKTCSNCGFTITSADYDRVLEKLKKTATGWMTTINGKELKVEGQITYYNRYKRQNVVKDLSVELDRLSEESVNNDISSWTKGRSGEALSLLKKRFSHRPVQEKFVCLNCGFETHADEQAALNIARSWLFLRSQEYKKYQTNKTTGNTDKRAFVETWQSFYRKKLKEVWKPAV

SEQ ID NO: 27113 - protein, 979 aa, Artificial Sequence
  CasX Variant
QEIKRINKIRRRLVKDSNTKKAGKTGPMKTLLVRVMTPDLRERLENLRKKPENIPQPISNTSRANLNKLLTDYTEMKKAILHVYWEEFQKDPVGLMSRVAQPASKKIDQNKLKPEMDEKGNLTTAGFACSQCGQPLFVYKLEQVSEKGKAYTNYFGRCNVAEHEKLILLAQLKPEKDSDEAVTYSLGKFGQRALDFYSIHVTKESTHPVKPLAQIAGNRYASGPVGKALSDACMGTIASFLSKYQDIIIEHQKVVKGNQKRLESLRELAGKENLEYPSVTLPPQPHTKEGVDAYNEVIARVRMWVNLNLWQKLKLSRDDAKPLLRLKGFPSFPLVERQANEVDWWDMVCNVKKLINEKKEDGKVFWQNLAGYKRQEALRPYLSSEEDRKKGKKFARYQLGDLLLHLEKKHGEDWGKVYDEAWERIDKKVEGLSKHIKLEEERRSEDAQSKAALTDWLRAKASFVIEGLKEADKDEFCRCELKLQKWYGDLRGKPFAIEAENSILDISGFSKQYNCAFIWQKDGVKKLNLYLIINYFKGGKLRFKKIKPEAFEANRFYTVINKKSGEIVPMEVNFNFDDPNLIILPLAFGKRQGREFIWNDLLSLETGSLKLANGRVIEKTLYNRRTRQDEPALFVALTFERREVLDSSNIKPMNLIGVDRGENIPAVIALTDPEGCPLSRFKDSLGNPTHILRIGESYKEKQRTIQAKKEVEQRRAGGYSRKYASKAKNLADDMVRNTARDLLYYAVTQDAMLIFENLSRGFGRQGKRTFMAERQYTRMEDWLTAKLAYEGLPSKTYLSKTLAQYTSKNTCSNCGFTITSADYDRVLEKLKKTATGWMTTINGKELKVEGQITYYNRYKRQNVVKDLSVELDRLSEESVNNDISSWTKGRSGEALSLLKKRFSHRPVQEKFVCLNCGFETHADEQAALNIARSWLFLRSQEYKKYQTNKTTGNTDKRAFVETWQSFYRKKLKEVWKPAV

SEQ ID NO: 27114 - protein, 978 aa, Artificial Sequence
  CasX Variant
QEIKRINKIRRRLVKDSNTKKAGKTGPMKTLLVRVMTPDLRERLENLRKKPENIPQPISNTSRANLNKLLTDYTEMKKAILHVYWEEFQKDPVGLMSRVAQPASKKIDQNKLKPEMDEKGNLTTAGFACSQCGQPLFVYKLEQVSEKGKAYTNYFGRCNVAEHEKLILLAQLKPEKDSDEAVTYSLGKFGQRALDFYSIHVTKESTHPVKPLAQIAGNRYASGPVGKALSDACMGTIASFLSKYQDIIIEHQKVVKGNQKRLESLRELAGKENLEYPSVTLPPQPHTKEGVDAYNEVIARVRMWVNLNLWQKLKLSRDDAKPLLRLKGFPSFPLVERQANEVDWWDMVCNVKKLINEKKEDGKVFWQNLAGYKRQEALRPYLSSEEDRKKGKKFARYQLGDLLLHLEKKHGEDWGKVYDEAWERIDKKVEGLSKHIKLEEERRSEDAQSKAALTDWLRAKASFVIEGLKEADKDEFCRCELKLQKWYGDLRGKPFAIEAENSILDISGFSKQYNCAFIWQKDGVKKLNLYLIINYFKGGKLRFKKIKPEAFEANRFYTVINKKSGEIVPMEVNFNFDDPNLIILPLAFGKRQGREFIWNDLLSLETGSLKLANGRVIEKTLYNRRTRQDEPALFVALTFERREVLDSSNIKPMNLIGVDRGENIPAVIALTDPEGCPLSRFKDSLGNPTHILRIGESYKEKQRTIQAKKEVEQRRAGGYSRKYASKAKNLADDMVRNTARDLLYYAVTQDAMLIFENLSRGFGRQGKRTFMAERQYTRMEDWLTAKLAYEGLPSKTYLSKTLAQYTSKTCSNCGPTITSADYDRVLEKLKKTATGWMTTINGKELKVEGQITYYNRYKRQNVVKDLSVELDRLSEESVNNDISSWTKGRSGEALSLLKKRFSHRPVQEKFVCLNCGFETHADEQAALNIARSWLFLRSQEYKKYQTNKTTGNTDKRAFVETWQSFYRKKLKEVWKPAV

SEQ ID NO: 27115 - protein, 979 aa, Artificial Sequence
  CasX Variant
QEIKRINKIRRRLVKDSNTKKAGKTGPMKTLLVRVMTPDLRERLENLRKKPENIPQPISNTSRANLNKLLTDYTEMKKAILHVYWEEFQKDPVGLMSRVAQPASKKIDQNKLKPEMDEKGNLTTAGFACSQCGQPLFVYKLEQVSEKGKAYTNYFGRCNVAEHEKLILLAQLKPEKDSDEAVTYSLGKFGQRALDFYSIHVTKESTHPVKPLAQIAGNRYASGPVGKALSDACMGTIASFLSKYQDIIIEHQKVVKGNQKRLESLRELAGKENLEYPSVTLPPQPHTKEGVDAYNEVIARVRMWVNLNLWQKLKLSRDDAKPLLRLKGFPSFPLVERQANEVDWWDMVCNVKKLINEKKEDGKVFWQNLAGYKRQEALRPYLSSEEDRKKGKKFARYQLGDLLLHLEKKHGEDWGKVYDEAWERIDKKVEGLSKHIKLEEERRSEDAQSKAALTDWLRAKASFVIEGLKEADKDEFCRCELKLQKWYGDLRGKPFAIEAENSILDISGFSKQYNCAFIWQKDGVKKLNLYLIINYFKGGKLRFKKIKPEAFEANRFYTVINKKSGEIVPMEVNFNFDDPNLIILPLAFGKRQGREFIWNDLLSLETGSLKLANGRVIEKTLYNRRTRQDEPALFVALTFERREVLDSSNIKPMNLIGVDRGENIPAVIALTDPEGCPLSRFKDSLGNPTHILRIGESYKEKQRTIQAKKEVEQRRAGGYSRKYASKAKNLADDMVRNTARDLLYYAVTQDAMLIFENLSRGFGRQGKRTFMAERQYTRMEDWLTAKLAYEGLPSKTYLSKTWLAQYTSKTCSNCGFTITSADYDRVLEKLKKTATGWMTTINGKELKVEGQITYYNRYKRQNVVKDLSVELDRLSEESVNNDISSWTKGRSGEALSLLKKRFSHRPVQEKFVCLNCGFETHADEQAALNIARSWLFLRSQEYKKYQTNKTTGNTDKRAFVETWQSFYRKKLKEVWKPAV

SEQ ID NO: 27116 - protein, 978 aa, Artificial Sequence
  CasX Variant
QEIKRINKIRRRLVKDSNTKKAGKTGPMKTLLVRVMTPDLRERLENLRKKPENIPQPISNTSRANLNKLLTDYTEMKKAILHVYWEEFQKDPVGLMSRVAQPASKKIDQNKLKPEMDEKGNLTTAGFACSQCGQPLFVYKLEQVSEKGKAYTNYFGRCNVAEHEKLILLAQLKPEKDSDEAVTYSLGKFGQRALDFYSIHVTKESTHPVKPLAQIAGNRYASGPVGKALSDACMGTIASFLSKYQDIIIEHQKVVKGNQKRLESLRELAGKENLEYPSVTLPPQPHTKEGVDAYNEVIARVRMWVNLNLWQKLKLSRDDAKPLLRLKGFPSFPLVERQANEVDWWDMVCNVKKLINEKKEDGKVFWQNLAGYKRQEALRPYLSSEEDRKKGKKFARYQLGDLLLHLEKKHGEDWGKVYDEAWERIDKKVEGLSKHIKLEEERRSEDAQSKAALTDWLRAKASFVIEGLKEADKDEFCRCELKLQKWYGDLRGKPFAIEAENSILDISGFSKQYNCAFIWQKDGVKKLNLYLIINYFKGGKLRFKKIKPEAFEANRFYTVINKKSGEIVPMEVNFNFDDPNLIILPLAFGKRQGREFIWNDLLSLETGSLKLANGRVIEKTLYNRRTRQDEPALFVALTFERREVLDSSNIKPMNLIGVDRGENIPAVIALTDPEGCPLSRFKDSLGNPTHILRIGESYKEKQRTIQAKKEVEQRRAGGYSRKYASKAKNLADDMVRNTARDLLYYAVTQDAMLIFENLSRGFGRQGKRTFMAERQYTRMEDWLTAKLAYEGLPSKTYLSKTLAQYTSKTMSNCGFTITSADYDRVLEKLKKTATGWMTTINGKELKVEGQITYYNRYKRQNVVKDLSVELDRLSEESVNNDISSWTKGRSGEALSLLKKRFSHRPVQEKFVCLNCGFETHADEQAALNIARSWLFLRSQEYKKYQTNKTTGNTDKRAFVETWQSFYRKKLKEVWKPAV

SEQ ID NO: 27117 - protein, 977 aa, Artificial Sequence
  CasX Variant
QEIKRINKIRRRLVKDSNTKKAGKTGPMKTLLVRVMTPDLRERLENLRKKPENIPQPISNTSRANLNKLLTDYTEMKKAILHVYWEEFQKDPVGLMSRVAQPASKKIDQNKLKPEMDEKGNLTTAGFACSQCGQPLFVYKLEQVSEKGKAYTNYFGRCNVAEHEKLILLAQLKPEKDSDEAVTYSLGKFGQRALDFYSIHVTKESTHPVKPLAQIAGNRYASGPVGKALSDACMGTIASFLSKYQDIIIEHQKVVKGNQKRLESLRELAGKENLEYPSVTLPPQPHTKEGVDAYNEVIARVRMWVNLNLWQKLKLSRDDAKPLLRLKGFPSFPLVERQANEVDWWDMVCNVKKLINEKKEDGKVFWQNLAGYKRQEALRPYLSSEEDRKKGKKFARYQLGDLLLHLEKKHGEDWGKVYDEAWERIDKKVEGLSKHIKLEEERRSEDAQSKAALTDWLRAKASFVIEGLKEADKDEFCRCELKLQKWYGDLRGKPFAIEAENSILDISGFSKQYNCAFIWQKDGVKKLNLYLIINYFKGGKLRFKKIKPEAFEANRFYTVINKKSGEIVPMEVNFNFDDPNLIILPLAFGKRQGREFIWNDLLSLETGSLKLANGRVIEKTLYNRRTRQDEPALFVALTFERREVLDSSNIKPMNLIGVDRGENIPAVIALTDPEGCPLSRFKDSLGNPTHILRIGESYKEKQRTIQAKKEVEQRRAGGYSRKYASKAKNLADDMVRNTARDLLYYAVTQDAMLIFENLSRGFGRQGKRTFMAERQYTRMEDWLTAKLAYEGLPSKTYLSKTLAQYTSKTCSCGFTITSADYDRVLEKLKKTATGWMTTINGKELKVEGQITYYNRYKRQNVVKDLSVELDRLSEESVNNDISSWTKGRSGEALSLLKKRFSHRPVQEKFVCLNCGFETHADEQAALNIARSWLFLRSQEYKKYQTNKTTGNTDKRAFVETWQSFYRKKLKEVWKPAV

SEQ ID NO: 27118 - protein, 979 aa, Artificial Sequence
  CasX Variant
QEIKRINKIRRRLVKDSNTKKAGKTGPMKTLLVRVMTPDLRERLENLRKKPENIPQPISNTSRANLNKLLTDYTEMKKAILHVYWEEFQKDPVGLMSRVAQPASKKIDQNKLKPEMDEKGNLTTAGFACSQCGQPLFVYKLEQVSEKGKAYTNYFGRCNVAEHEKLILLAQLKPEKDSDEAVTYSLGKFGQRALDFYSIHVTKESTHPVKPLAQIAGNRYASGPVGKALSDACMGTIASFLSKYQDIIIEHQKVVKGNQKRLESLRELAGKENLEYPSVTLPPQPHTKEGVDAYNEVIARVRMWVNLNLWQKLKLSRDDAKPLLRLKGFPSFPLVERQANEVDWWDMVCNVKKLINEKKEDGKVFWQNLAGYKRQEALRPYLSSEEDRKKGKKFARYQLGDLLLHLEKKHGEDWGKVYDEAWERIDKKVEGLSKHIKLEEERRSEDAQSKAALTDWLRAKASFVIEGLKEADKDEFCRCELKLQKWYGDLRGKPFAIEAENSILDISGFSKQYNCAFIWQKDGVKKLNLYLIINYFKGGKLRFKKIKPEAFEANRFYTVINKKSGEIVPMEVNFNFDDPNLIILPLAFGKRQGREFIWNDLLSLETGSLKLANGRVIEKTLYNRRTRQDEPALFVALTFERREVLDSSNIKPMNLIGVDRGENIPAVIALTDPEGCPLSRFKDSLGNPTHILRIGESYKEKQRTIQAKKEVEQRRAGGYSRKYASKAKNLADDMVRNTARDLLYYAVTQDAMLIFENLSRGFGRQGKRTFMAERQYTRMEDWLTAKLAYEGLPSKTYLSKTLAQYTSKTCSVNCGFTITSADYDRVLEKLKKTATGWMTTINGKELKVEGQITYYNRYKRQNVVKDLSVELDRLSEESVNNDISSWTKGRSGEALSLLKKRFSHRPVQEKFVCLNCGFETHADEQAALNIARSWLFLRSQEYKKYQTNKTTGNTDKRAFVETWQSFYRKKLKEVWKPAV

SEQ ID NO: 27119 - protein, 978 aa, Artificial Sequence
  CasX Variant
QEIKRINKIRRRLVKDSNTKKAGKTGPMKTLLVRVMTPDLRERLENLRKKPENIPQPISNTSRANLNKLLTDYTEMKKAILHVYWEEFQKDPVGLMSRVAQPASKKIDQNKLKPEMDEKGNLTTAGFACSQCGQPLFVYKLEQVSEKGKAYTNYFGRCNVAEHEKLILLAQLKPEKDSDEAVTYSLGKFGQRALDFYSIHVTKESTHPVKPLAQIAGNRYASGPVGKALSDACMGTIASFLSKYQDIIIEHQKVVKGNQKRLESLRELAGKENLEYPSVTLPPQPHTKEGVDAYNEVIARVRMWVNLNLWQKLKLSRDDAKPLLRLKGFPSFPLVERQANEVDWWDMVCNVKKLINEKKEDGKVFWQNLAGYKRQEALRPYLSSEEDRKKGKKFARYQLGDLLLHLEKKHGEDWGKVYDEAWERIDKKVEGLSKHIKLEEERRSEDAQSKAALTDWLRAKASFVIEGLKEADKDEFCRCELKLQKWYGDLRGKPFAIEAENSILDISGFSKQYNCAFIWQKDGVKKLNLYLIINYFKGGKLRFKKIKPEAFEANRFYTVINKKSGEIVPMEVNFNFDDPNLIILPLAFGKRQGREFIWNDLLSLETGSLKLANGRVIEKTLYNRRTRQDEPALFVALTFERREVLDSSNIKPMNLIGVDRGENIPAVIALTDPEGCPLSRFKDSLGNPTHILRIGESYKEKQRTIQAKKEVEQRRAGGYSRKYASKAKNLADDMVRNTARDLLYYAVTQDAMLIFENLSRGFGRQGKRTFMAERQYTRMEDWLTAKLAYEGLPSKTYLSKTLAQYTPKTCSNCGFTITSADYDRVLEKLKKTATGWMTTINGKELKVEGQITYYNRYKRQNVVKDLSVELDRLSEESVNNDISSWTKGRSGEALSLLKKRFSHRPVQEKFVCLNCGFETHADEQAALNIARSWLFLRSQEYKKYQTNKTTGNTDKRAFVETWQSFYRKKLKEVWKPAV

SEQ ID NO: 27120 - protein, 979 aa, Artificial Sequence
  CasX Variant
QEIKRINKIRRRLVKDSNTKKAGKTGPMKTLLVRVMTPDLRERLENLRKKPENIPQPISNTSRANLNKLLTDYTEMKKAILHVYWEEFQKDPVGLMSRVAQPASKKIDQNKLKPEMDEKGNLTTAGFACSQCGQPLFVYKLEQVSEKGKAYTNYFGRCNVAEHEKLILLAQLKPEKDSDEAVTYSLGKFGQRALDFYSIHVTKESTHPVKPLAQIAGNRYASGPVGKALSDACMGTIASFLSKYQDIIIEHQKVVKGNQKRLESLRELAGKENLEYPSVTLPPQPHTKEGVDAYNEVIARVRMWVNLNLWQKLKLSRDDAKPLLRLKGFPSFPLVERQANEVDWWDMVCNVKKLINEKKEDGKVFWQNLAGYKRQEALRPYLSSEEDRKKGKKFARYQLGDLLLHLEKKHGEDWGKVYDEAWERIDKKVEGLSKHIKLEEERRSEDAQSKAALTDWLRAKASFVIEGLKEADKDEFCRCELKLQKWYGDLRGKPFAIEAENSILDISGFSKQYNCAFIWQKDGVKKLNLYLIINYFKGGKLRFKKIKPEAFEANRFYTVINKKSGEIVPMEVNFNFDDPNLIILPLAFGKRQGREFIWNDLLSLETGSLKLANGRVIEKTLYNRRTRQDEPALFVALTFERREVLDSSNIKPMNLIGVDRGENIPAVIALTDPEGCPLSRFKDSLGNPTHILRIGESYKEKQRTIQAKKEVEQRRAGGYSRKYASKAKNLADDMVRNTARDLLYYAVTQDAMLIFENLSRGFGRQGKRTFMAERQYTRMEDWPLTAKLAYEGLPSKTYLSKTLAQYTSKTCSNCGFTITSADYDRVLEKLKKTATGWMTTINGKELKVEGQITYYNRYKRQNVVKDLSVELDRLSEESVNNDISSWTKGRSGEALSLLKKRFSHRPVQEKFVCLNCGFETHADEQAALNIARSWLFLRSQEYKKYQTNKTTGNTDKRAFVETWQSFYRKKLKEVWKPAV

SEQ ID NO: 27121 - protein, 979 aa, Artificial Sequence
  CasX Variant
QEIKRINKIRRRLVKDSNTKKAGKTGPMKTLLVRVMTPDLRERLENLRKKPENIPQPISNTSRANLNKLLTDYTEMKKAILHVYWEEFQKDPVGLMSRVAQPASKKIDQNKLKPEMDEKGNLTTAGFACSQCGQPLFVYKLEQVSEKGKAYTNYFGRCNVAEHEKLILLAQLKPEKDSDEAVTYSLGKFGQRALDFYSIHVTKESTHPVKPLAQIAGNRYASGPVGKALSDACMGTIASFLSKYQDIIIEHQKVVKGNQKRLESLRELAGKENLEYPSVTLPPQPHTKEGVDAYNEVIARVRMWVNLNLWQKLKLSRDDAKPLLRLKGFPSFPLVERQANEVDWWDMVCNVKKLINEKKEDGKVFWQNLAGYKRQEALRPYLSSEEDRKKGKKFARYQLGDLLLHLEKKHGEDWGKVYDEAWERIDKKVEGLSKHIKLEEERRSEDAQSKAALTDWLRAKASFVIEGLKEADKDEFCRCELKLQKWYGDLRGKPFAIEAENSILDISGFSKQYNCAFIWQKDGVKKLNLYLIINYFKGGKLRFKKIKPEAFEANRFYTVINKKSGEIVPMEVNFNFDDPNLIILPLAFGKRQGREFIWNDLLSLETGSLKLANGRVIEKTLYNRRTRQDEPALFVALTFERREVLDSSNIKPMNLIGVDRGENIPAVIALTDPEGCPLSRFKDSLGNPTHILRIGESYKEKQRTIQAKKEVEQRRAGGYSRKYASKAKNLADDMVRNTARDLLYYAVTQDAMLIFENLSRGFGRQGKRTFMAERQYTRMEDWLTAKLAYEGLPSKTYLSKTLAQYTSKTCMSNCGFTITSADYDRVLEKLKKTATGWMTTINGKELKVEGQITYYNRYKRQNVVKDLSVELDRLSEESVNNDISSWTKGRSGEALSLLKKRFSHRPVQEKFVCLNCGFETHADEQAALNIARSWLFLRSQEYKKYQTNKTTGNTDKRAFVETWQSFYRKKLKEVWKPAV

SEQ ID NO: 27122 - protein, 979 aa, Artificial Sequence
  CasX Variant
QEIKRINKIRRRLVKDSNTKKAGKTGPMKTLLVRVMTPDLRERLENLRKKPENIPQPISNTSRANLNKLLTDYTEMKKAILHVYWEEFQKDPVGLMSRVAQPASKKIDQNKLKPEMDEKGNLTTAGFACSQCGQPLFVYKLEQVSEKGKAYTNYFGRCNVAEHEKLILLAQLKPEKDSDEAVTYSLGKFGQRALDFYSIHVTKESTHPVKPLAQIAGNRYASGPVGKALSDACMGTIASFLSKYQDIIIEHQKVVKGNQKRLESLRELAGKENLEYPSVTLPPQPHTKEGVDAYNEVIARVRMWVNLNLWQKLKLSRDDAKPLLRLKGFPSFPLVERQANEVDWWDMVCNVKKLINEKKEDGKVFWQNLAGYKRQEALRPYLSSEEDRKKGKKFARYQLGDLLLHLEKKHGEDWGKVYDEAWERIDKKVEGLSKHIKLEEERRSEDAQSKAALTDWLRAKASFVIEGLKEADKDEFCRCELKLQKWYGDLRGKPFAIEAENSILDISGFSKQYNCAFIWQKDGVKKLNLYLIINYFKGGKLRFKKIKPEAFEANRFYTVINKKSGEIVPMEVNFNFDDPNLIILPLAFGKRQGREFIWNDLLSLETGSLKLANGRVIEKTLYNRRTRQDEPALFVALTFERREVLDSSNIKPMNLIGVDRGENIPAVIALTDPEGCPLSRFKDSLGNPTHILRIGESYKEKQRTIQAKKEVEQRRAGGYSRKYASKAKNLADDMVRNTARDLLYYAVTQDAMLIFENLSRGFGRQGKRTFMAERQYTRMEDWLTAKLARYEGLPSKTYLSKTLAQYTSKTCSNCGFTITSADYDRVLEKLKKTATGWMTTINGKELKVEGQITYYNRYKRQNVVKDLSVELDRLSEESVNNDISSWTKGRSGEALSLLKKRFSHRPVQEKFVCLNCGFETHADEQAALNIARSWLFLRSQEYKKYQTNKTTGNTDKRAFVETWQSFYRKKLKEVWKPAV

SEQ ID NO: 27123 - protein, 978 aa, Artificial Sequence
  CasX Variant
QEIKRINKIRRRLVKDSNTKKAGKTGPMKTLLVRVMTPDLRERLENLRKKPENIPQPISNTSRANLNKLLTDYTEMKKAILHVYWEEFQKDPVGLMSRVAQPASKKIDQNKLKPEMDEKGNLTTAGFACSQCGQPLFVYKLEQVSEKGKAYTNYFGRCNVAEHEKLILLAQLKPEKDSDEAVTYSLGKFGQRALDFYSIHVTKESTHPVKPLAQIAGNRYASGPVGKALSDACMGTIASFLSKYQDIIIEHQKVVKGNQKRLESLRELAGKENLEYPSVTLPPQPHTKEGVDAYNEVIARVRMWVNLNLWQKLKLSRDDAKPLLRLKGFPSFPLVERQANEVDWWDMVCNVKKLINEKKEDGKVFWQNLAGYKRQEALRPYLSSEEDRKKGKKFARYQLGDLLLHLEKKHGEDWGKVYDEAWERIDKKVEGLSKHIKLEEERRSEDAQSKAALTDWLRAKASFVIEGLKEADKDEFCRCELKLQKWYGDLRGKPFAIEAENSILDISGFSKQYNCAFIWQKDGVKKLNLYLIINYFKGGKLRFKKIKPEAFEANRFYTVINKKSGEIVPMEVNFNFDDPNLIILPLAFGKRQGREFIWNDLLSLETGSLKLANGRVIEKTLYNRRTRQDEPALFVALTFERREVLDSSNIKPMNLIGVDRGENIPAVIALTDPEGCPLSRFKDSLGNPTHILRIGESYKEKQRTIQAKKEVEQRRAGGYSRKYASKAKNLADDMVRNTARDLLYYAVTQDAMLIFENLSRGFGRQGKRTFMAERQYTRMEDWLTAKLAYEGLPSKTYLSKTLAQYFSKTCSNCGFTITSADYDRVLEKLKKTATGWMTTINGKELKVEGQITYYNRYKRQNVVKDLSVELDRLSEESVNNDISSWTKGRSGEALSLLKKRFSHRPVQEKFVCLNCGFETHADEQAALNIARSWLFLRSQEYKKYQTNKTTGNTDKRAFVETWQSFYRKKLKEVWKPAV

SEQ ID NO: 27124 - protein, 977 aa, Artificial Sequence
  CasX Variant
QEIKRINKIRRRLVKDSNTKKAGKTGPMKTLLVRVMTPDLRERLENLRKKPENIPQPISNTSRANLNKLLTDYTEMKKAILHVYWEEFQKDPVGLMSRVAQPASKKIDQNKLKPEMDEKGNLTTAGFACSQCGQPLFVYKLEQVSEKGKAYTNYFGRCNVAEHEKLILLAQLKPEKDSDEAVTYSLGKFGQRALDFYSIHVTKESTHPVKPLAQIAGNRYASGPVGKALSDACMGTIASFLSKYQDIIIEHQKVVKGNQKRLESLRELAGKENLEYPSVTLPPQPHTKEGVDAYNEVIARVRMWVNLNLWQKLKLSRDDAKPLLRLKGFPSFPLVERQANEVDWWDMVCNVKKLINEKKEDGKVFWQNLAGYKRQEALRPYLSSEEDRKKGKKFARYQLGDLLLHLEKKHGEDWGKVYDEAWERIDKKVEGLSKHIKLEEERRSEDAQSKAALTDWLRAKASFVIEGLKEADKDEFCRCELKLQKWYGDLRGKPFAIEAENSILDISGFSKQYNCAFIWQKDGVKKLNLYLIINYFKGGKLRFKKIKPEAFEANRFYTVINKKSGEIVPMEVNFNFDDPNLIILPLAFGKRQGREFIWNDLLSLETGSLKLANGRVIEKTLYNRRTRQDEPALFVALTFERREVLDSSNIKPMNLIGVDRGENIPAVIALTDPEGCPLSRFKDSLGNPTHILRIGESYKEKQRTIQAKKEVEQRRAGGYSRKYASKAKNLADDMVRNTARDLLYYAVTQDAMLIFENLSRGFGRQGKRTFMAERQYTRMEDWLTAKAYEGLPSKTYLSKTLAQYTSKTCSNCGFTITSADYDRVLEKLKKTATGWMTTINGKELKVEGQITYYNRYKRQNVVKDLSVELDRLSEESVNNDISSWTKGRSGEALSLLKKRFSHRPVQEKFVCLNCGFETHADEQAALNIARSWLFLRSQEYKKYQTNKTTGNTDKRAFVETWQSFYRKKLKEVWKPAV

SEQ ID NO: 27125 - protein, 978 aa, Artificial Sequence
  CasX Variant
QEIKRINKIRRRLVKDSNTKKAGKTGPMKTLLVRVMTPDLRERLENLRKKPENIPQPISNTSRANLNKLLTDYTEMKKAILHVYWEEFQKDPVGLMSRVAQPASKKIDQNKLKPEMDEKGNLTTAGFACSQCGQPLFVYKLEQVSEKGKAYTNYFGRCNVAEHEKLILLAQLKPEKDSDEAVTYSLGKFGQRALDFYSIHVTKESTHPVKPLAQIAGNRYASGPVGKALSDACMGTIASFLSKYQDIIIEHQKVVKGNQKRLESLRELAGKENLEYPSVTLPPQPHTKEGVDAYNEVIARVRMWVNLNLWQKLKLSRDDAKPLLRLKGFPSFPLVERQANEVDWWDMVCNVKKLINEKKEDGKVFWQNLAGYKRQEALRPYLSSEEDRKKGKKFARYQLGDLLLHLEKKHGEDWGKVYDEAWERIDKKVEGLSKHIKLEEERRSEDAQSKAALTDWLRAKASFVIEGLKEADKDEFCRCELKLQKWYGDLRGKPFAIEAENSILDISGFSKQYNCAFIWQKDGVKKLNLYLIINYFKGGKLRFKKIKPEAFEANRFYTVINKKSGEIVPMEVNFNFDDPNLIILPLAFGKRQGREFIWNDLLSLETGSLKLANGRVIEKTLYNRRTRQDEPALFVALTFERREVLDSSNIKPMNLIGVDRGENIPAVIALTDPEGCPLSRFKDSLGNPTHILRIGESYKEKQRTIQAKKEVEQRRAGGYSRKYASKAKNLADDMVRNTARDLLYYAVTQDAMLIFENLSRGFGRQGKRTFMAERQYTRMEDWLTAKLAYEGLPSQTYLSKTLAQYTSKTCSNCGFTITSADYDRVLEKLKKTATGWMTTINGKELKVEGQITYYNRYKRQNVVKDLSVELDRLSEESVNNDISSWTKGRSGEALSLLKKRFSHRPVQEKFVCLNCGFETHADEQAALNIARSWLFLRSQEYKKYQTNKTTGNTDKRAFVETWQSFYRKKLKEVWKPAV

SEQ ID NO: 27126 - protein, 978 aa, Artificial Sequence
  CasX Variant
QEIKRINKIRRRLVKDSNTKKAGKTGPMKTLLVRVMTPDLRERLENLRKKPENIPQPISNTSRANLNKLLTDYTEMKKAILHVYWEEFQKDPVGLMSRVAQPASKKIDQNKLKPEMDEKGNLTTAGFACSQCGQPLFVYKLEQVSEKGKAYTNYFGRCNVAEHEKLILLAQLKPEKDSDEAVTYSLGKFGQRALDFYSIHVTKESTHPVKPLAQIAGNRYASGPVGKALSDACMGTIASFLSKYQDIIIEHQKVVKGNQKRLESLRELAGKENLEYPSVTLPPQPHTKEGVDAYNEVIARVRMWVNLNLWQKLKLSRDDAKPLLRLKGFPSFPLVERQANEVDWWDMVCNVKKLINEKKEDGKVFWQNLAGYKRQEALRPYLSSEEDRKKGKKFARYQLGDLLLHLEKKHGEDWGKVYDEAWERIDKKVEGLSKHIKLEEERRSEDAQSKAALTDWLRAKASFVIEGLKEADKDEFCRCELKLQKWYGDLRGKPFAIEAENSILDISGFSKQYNCAFIWQKDGVKKLNLYLIINYFKGGKLRFKKIKPEAFEANRFYTVINKKSGEIVPMEVNFNFDDPNLIILPLAFGKRQGREFIWNDLLSLETGSLKLANGRVIEKTLYNRRTRQDEPALFVALTFERREVLDSSNIKPMNLIGVDRGENIPAVIALTDPEGCPLSRFKDSLGNPTHILRIGESYKEKQRTIQAKKEVEQRRAGGYSRKYASKAKNLADDMVRNTARDLLYYAVTQDAMLIFENLSRGFGRQGKRTFMAERQYTRMEDWLTAKLAYNGLPSKTYLSKTLAQYTSKTCSNCGFTITSADYDRVLEKLKKTATGWMTTINGKELKVEGQITYYNRYKRQNVVKDLSVELDRLSEESVNNDISSWTKGRSGEALSLLKKRFSHRPVQEKFVCLNCGFETHADEQAALNIARSWLFLRSQEYKKYQTNKTTGNTDKRAFVETWQSFYRKKLKEVWKPAV

SEQ ID NO: 27127 - protein, 979 aa, Artificial Sequence
  CasX Variant
QEIKRINKIRRRLVKDSNTKKAGKTGPMKTLLVRVMTPDLRERLENLRKKPENIPQPISNTSRANLNKLLTDYTEMKKAILHVYWEEFQKDPVGLMSRVAQPASKKIDQNKLKPEMDEKGNLTTAGFACSQCGQPLFVYKLEQVSEKGKAYTNYFGRCNVAEHEKLILLAQLKPEKDSDEAVTYSLGKFGQRALDFYSIHVTKESTHPVKPLAQIAGNRYASGPVGKALSDACMGTIASFLSKYQDIIIEHQKVVKGNQKRLESLRELAGKENLEYPSVTLPPQPHTKEGVDAYNEVIARVRMWVNLNLWQKLKLSRDDAKPLLRLKGFPSFPLVERQANEVDWWDMVCNVKKLINEKKEDGKVFWQNLAGYKRQEALRPYLSSEEDRKKGKKFARYQLGDLLLHLEKKHGEDWGKVYDEAWERIDKKVEGLSKHIKLEEERRSEDAQSKAALTDWLRAKASFVIEGLKEADKDEFCRCELKLQKWYGDLRGKPFAIEAENSILDISGFSKQYNCAFIWQKDGVKKLNLYLIINYFKGGKLRFKKIKPEAFEANRFYTVINKKSGEIVPMEVNFNFDDPNLIILPLAFGKRQGREFIWNDLLSLETGSLKLANGRVIEKTLYNRRTRQDEPALFVALTFERREVLDSSNIKPMNLIGVDRGENIPAVIALTDPEGCPLSRFKDSLGNPTHILRIGESYKEKQRTIQAKKEVEQRRAGGYSRKYASKAKNLADDMVRNTARDLLYYAVTQDAMLIFENLSRGFGRQGKRTFMAERQYTRMEDWLTAKLAYEGLPSKTYLHSKTLAQYTSKTCSNCGFTITSADYDRVLEKLKKTATGWMTTINGKELKVEGQITYYNRYKRQNVVKDLSVELDRLSEESVNNDISSWTKGRSGEALSLLKKRFSHRPVQEKFVCLNCGFETHADEQAALNIARSWLFLRSQEYKKYQTNKTTGNTDKRAFVETWQSFYRKKLKEVWKPAV

SEQ ID NO: 27128 - protein, 978 aa, Artificial Sequence
  CasX Variant
QEIKRINKIRRRLVKDSNTKKAGKTGPMKTLLVRVMTPDLRERLENLRKKPENIPQPISNTSRANLNKLLTDYTEMKKAILHVYWEEFQKDPVGLMSRVAQPASKKIDQNKLKPEMDEKGNLTTAGFACSQCGQPLFVYKLEQVSEKGKAYTNYFGRCNVAEHEKLILLAQLKPEKDSDEAVTYSLGKFGQRALDFYSIHVTKESTHPVKPLAQIAGNRYASGPVGKALSDACMGTIASFLSKYQDIIIEHQKVVKGNQKRLESLRELAGKENLEYPSVTLPPQPHTKEGVDAYNEVIARVRMWVNLNLWQKLKLSRDDAKPLLRLKGFPSFPLVERQANEVDWWDMVCNVKKLINEKKEDGKVFWQNLAGYKRQEALRPYLSSEEDRKKGKKFARYQLGDLLLHLEKKHGEDWGKVYDEAWERIDKKVEGLSKHIKLEEERRSEDAQSKAALTDWLRAKASFVIEGLKEADKDEFCRCELKLQKWYGDLRGKPFAIEAENSILDISGFSKQYNCAFIWQKDGVKKLNLYLIINYFKGGKLRFKKIKPEAFEANRFYTVINKKSGEIVPMEVNFNFDDPNLIILPLAFGKRQGREFIWNDLLSLETGSLKLANGRVIEKTLYNRRTRQDEPALFVALTFERREVLDSSNIKPMNLIGVDRGENIPAVIALTDPEGCPLSRFKDSLGNPTHILRIGESYKEKQRTIQAKKEVEQRRAGGYSRKYASKAKNLADDMVRNTARDLLYYAVTQDAMLIFENLSRGFGRQGKRTFMAERQYTRMEDWLTAKLAYEGLPSKVYLSKTLAQYTSKTCSNCGFTITSADYDRVLEKLKKTATGWMTTINGKELKVEGQITYYNRYKRQNVVKDLSVELDRLSEESVNNDISSWTKGRSGEALSLLKKRFSHRPVQEKFVCLNCGFETHADEQAALNIARSWLFLRSQEYKKYQTNKTTGNTDKRAFVETWQSFYRKKLKEVWKPAV

SEQ ID NO: 27129 - protein, 979 aa, Artificial Sequence
  CasX Variant
QEIKRINKIRRRLVKDSNTKKAGKTGPMKTLLVRVMTPDLRERLENLRKKPENIPQPISNTSRANLNKLLTDYTEMKKAILHVYWEEFQKDPVGLMSRVAQPASKKIDQNKLKPEMDEKGNLTTAGFACSQCGQPLFVYKLEQVSEKGKAYTNYFGRCNVAEHEKLILLAQLKPEKDSDEAVTYSLGKFGQRALDFYSIHVTKESTHPVKPLAQIAGNRYASGPVGKALSDACMGTIASFLSKYQDIIIEHQKVVKGNQKRLESLRELAGKENLEYPSVTLPPQPHTKEGVDAYNEVIARVRMWVNLNLWQKLKLSRDDAKPLLRLKGFPSFPLVERQANEVDWWDMVCNVKKLINEKKEDGKVFWQNLAGYKRQEALRPYLSSEEDRKKGKKFARYQLGDLLLHLEKKHGEDWGKVYDEAWERIDKKVEGLSKHIKLEEERRSEDAQSKAALTDWLRAKASFVIEGLKEADKDEFCRCELKLQKWYGDLRGKPFAIEAENSILDISGFSKQYNCAFIWQKDGVKKLNLYLIINYFKGGKLRFKKIKPEAFEANRFYTVINKKSGEIVPMEVNFNFDDPNLIILPLAFGKRQGREFIWNDLLSLETGSLKLANGRVIEKTLYNRRTRQDEPALFVALTFERREVLDSSNIKPMNLIGVDRGENIPAVIALTDPEGCPLSRFKDSLGNPTHILRIGESYKEKQRTIQAKKEVEQRRAGGYSRKYASKAKNLADDMVRNTARDLLYYAVTQDAMLIFENLSRGFGRQGKRTFMAERQYTRMEDWLTAKLQAYEGLPSKTYLSKTLAQYTSKTCSNCGFTITSADYDRVLEKLKKTATGWMTTINGKELKVEGQITYYNRYKRQNVVKDLSVELDRLSEESVNNDISSWTKGRSGEALSLLKKRFSHRPVQEKFVCLNCGFETHADEQAALNIARSWLFLRSQEYKKYQTNKTTGNTDKRAFVETWQSFYRKKLKEVWKPAV

SEQ ID NO: 27130 - protein, 979 aa, Artificial Sequence
  CasX Variant
QEIKRINKIRRRLVKDSNTKKAGKTGPMKTLLVRVMTPDLRERLENLRKKPENIPQPISNTSRANLNKLLTDYTEMKKAILHVYWEEFQKDPVGLMSRVAQPASKKIDQNKLKPEMDEKGNLTTAGFACSQCGQPLFVYKLEQVSEKGKAYTNYFGRCNVAEHEKLILLAQLKPEKDSDEAVTYSLGKFGQRALDFYSIHVTKESTHPVKPLAQIAGNRYASGPVGKALSDACMGTIASFLSKYQDIIIEHQKVVKGNQKRLESLRELAGKENLEYPSVTLPPQPHTKEGVDAYNEVIARVRMWVNLNLWQKLKLSRDDAKPLLRLKGFPSFPLVERQANEVDWWDMVCNVKKLINEKKEDGKVFWQNLAGYKRQEALRPYLSSEEDRKKGKKFARYQLGDLLLHLEKKHGEDWGKVYDEAWERIDKKVEGLSKHIKLEEERRSEDAQSKAALTDWLRAKASFVIEGLKEADKDEFCRCELKLQKWYGDLRGKPFAIEAENSILDISGFSKQYNCAFIWQKDGVKKLNLYLIINYFKGGKLRFKKIKPEAFEANRFYTVINKKSGEIVPMEVNFNFDDPNLIILPLAFGKRQGREFIWNDLLSLETGSLKLANGRVIEKTLYNRRTRQDEPALFVALTFERREVLDSSNIKPMNLIGVDRGENIPAVIALTDPEGCPLSRFKDSLGNPTHILRIGESYKEKQRTIQAKKEVEQRRAGGYSRKYASKAKNLADDMVRNTARDLLYYAVTQDAMLIFENLSRGFGRQGKRTFMAERQYTRMEDWLTAKLAYEGPLPSKTYLSKTLAQYTSKTCSNCGFTITSADYDRVLEKLKKTATGWMTTINGKELKVEGQITYYNRYKRQNVVKDLSVELDRLSEESVNNDISSWTKGRSGEALSLLKKRFSHRPVQEKFVCLNCGFETHADEQAALNIARSWLFLRSQEYKKYQTNKTTGNTDKRAFVETWQSFYRKKLKEVWKPAV

SEQ ID NO: 27131 - protein, 979 aa, Artificial Sequence
  CasX Variant
QEIKRINKIRRRLVKDSNTKKAGKTGPMKTLLVRVMTPDLRERLENLRKKPENIPQPISNTSRANLNKLLTDYTEMKKAILHVYWEEFQKDPVGLMSRVAQPASKKIDQNKLKPEMDEKGNLTTAGFACSQCGQPLFVYKLEQVSEKGKAYTNYFGRCNVAEHEKLILLAQLKPEKDSDEAVTYSLGKFGQRALDFYSIHVTKESTHPVKPLAQIAGNRYASGPVGKALSDACMGTIASFLSKYQDIIIEHQKVVKGNQKRLESLRELAGKENLEYPSVTLPPQPHTKEGVDAYNEVIARVRMWVNLNLWQKLKLSRDDAKPLLRLKGFPSFPLVERQANEVDWWDMVCNVKKLINEKKEDGKVFWQNLAGYKRQEALRPYLSSEEDRKKGKKFARYQLGDLLLHLEKKHGEDWGKVYDEAWERIDKKVEGLSKHIKLEEERRSEDAQSKAALTDWLRAKASFVIEGLKEADKDEFCRCELKLQKWYGDLRGKPFAIEAENSILDISGFSKQYNCAFIWQKDGVKKLNLYLIINYFKGGKLRFKKIKPEAFEANRFYTVINKKSGEIVPMEVNFNFDDPNLIILPLAFGKRQGREFIWNDLLSLETGSLKLANGRVIEKTLYNRRTRQDEPALFVALTFERREVLDSSNIKPMNLIGVDRGENIPAVIALTDPEGCPLSRFKDSLGNPTHILRIGESYKEKQRTIQAKKEVEQRRAGGYSRKYASKAKNLADDMVRNTARDLLYYAVTQDAMLIFENLSRGFGRQGKRTFMAERQYTRMEDWLTAKLAYEGLPSKTYLSKRTLAQYTSKTCSNCGFTITSADYDRVLEKLKKTATGWMTTINGKELKVEGQITYYNRYKRQNVVKDLSVELDRLSEESVNNDISSWTKGRSGEALSLLKKRFSHRPVQEKFVCLNCGFETHADEQAALNIARSWLFLRSQEYKKYQTNKTTGNTDKRAFVETWQSFYRKKLKEVWKPAV

SEQ ID NO: 27132 - protein, 979 aa, Artificial Sequence
  CasX Variant
QEIKRINKIRRRLVKDSNTKKAGKTGPMKTLLVRVMTPDLRERLENLRKKPENIPQPISNTSRANLNKLLTDYTEMKKAILHVYWEEFQKDPVGLMSRVAQPASKKIDQNKLKPEMDEKGNLTTAGFACSQCGQPLFVYKLEQVSEKGKAYTNYFGRCNVAEHEKLILLAQLKPEKDSDEAVTYSLGKFGQRALDFYSIHVTKESTHPVKPLAQIAGNRYASGPVGKALSDACMGTIASFLSKYQDIIIEHQKVVKGNQKRLESLRELAGKENLEYPSVTLPPQPHTKEGVDAYNEVIARVRMWVNLNLWQKLKLSRDDAKPLLRLKGFPSFPLVERQANEVDWWDMVCNVKKLINEKKEDGKVFWQNLAGYKRQEALRPYLSSEEDRKKGKKFARYQLGDLLLHLEKKHGEDWGKVYDEAWERIDKKVEGLSKHIKLEEERRSEDAQSKAALTDWLRAKASFVIEGLKEADKDEFCRCELKLQKWYGDLRGKPFAIEAENSILDISGFSKQYNCAFIWQKDGVKKLNLYLIINYFKGGKLRFKKIKPEAFEANRFYTVINKKSGEIVPMEVNFNFDDPNLIILPLAFGKRQGREFIWNDLLSLETGSLKLANGRVIEKTLYNRRTRQDEPALFVALTFERREVLDSSNIKPMNLIGVDRGENIPAVIALTDPEGCPLSRFKDSLGNPTHILRIGESYKEKQRTIQAKKEVEQRRAGGYSRKYASKAKNLADDMVRNTARDLLYYAVTQDAMLIFENLSRGFGRQGKRTFMAERQYTRMEDWLTAKLAYEGLPSKTYLSKTLAQYTSKTCSNCWGFTITSADYDRVLEKLKKTATGWMTTINGKELKVEGQITYYNRYKRQNVVKDLSVELDRLSEESVNNDISSWTKGRSGEALSLLKKRFSHRPVQEKFVCLNCGFETHADEQAALNIARSWLFLRSQEYKKYQTNKTTGNTDKRAFVETWQSFYRKKLKEVWKPAV

SEQ ID NO: 27133 - protein, 979 aa, Artificial Sequence
  CasX Variant
QEIKRINKIRRRLVKDSNTKKAGKTGPMKTLLVRVMTPDLRERLENLRKKPENIPQPISNTSRANLNKLLTDYTEMKKAILHVYWEEFQKDPVGLMSRVAQPASKKIDQNKLKPEMDEKGNLTTAGFACSQCGQPLFVYKLEQVSEKGKAYTNYFGRCNVAEHEKLILLAQLKPEKDSDEAVTYSLGKFGQRALDFYSIHVTKESTHPVKPLAQIAGNRYASGPVGKALSDACMGTIASFLSKYQDIIIEHQKVVKGNQKRLESLRELAGKENLEYPSVTLPPQPHTKEGVDAYNEVIARVRMWVNLNLWQKLKLSRDDAKPLLRLKGFPSFPLVERQANEVDWWDMVCNVKKLINEKKEDGKVFWQNLAGYKRQEALRPYLSSEEDRKKGKKFARYQLGDLLLHLEKKHGEDWGKVYDEAWERIDKKVEGLSKHIKLEEERRSEDAQSKAALTDWLRAKASFVIEGLKEADKDEFCRCELKLQKWYGDLRGKPFAIEAENSILDISGFSKQYNCAFIWQKDGVKKLNLYLIINYFKGGKLRFKKIKPEAFEANRFYTVINKKSGEIVPMEVNFNFDDPNLIILPLAFGKRQGREFIWNDLLSLETGSLKLANGRVIEKTLYNRRTRQDEPALFVALTFERREVLDSSNIKPMNLIGVDRGENIPAVIALTDPEGCPLSRFKDSLGNPTHILRIGESYKEKQRTIQAKKEVEQRRAGGYSRKYASKAKNLADDMVRNTARDLLYYAVTQDAMLIFENLSRGFGRQGKRTFMAERQYTRMEDWLTAKLANYEGLPSKTYLSKTLAQYTSKTCSNCGFTITSADYDRVLEKLKKTATGWMTTINGKELKVEGQITYYNRYKRQNVVKDLSVELDRLSEESVNNDISSWTKGRSGEALSLLKKRFSHRPVQEKFVCLNCGFETHADEQAALNIARSWLFLRSQEYKKYQTNKTTGNTDKRAFVETWQSFYRKKLKEVWKPAV

SEQ ID NO: 27134 - protein, 978 aa, Artificial Sequence
  CasX Variant
QEIKRINKIRRRLVKDSNTKKAGKTGPMKTLLVRVMTPDLRERLENLRKKPENIPQPISNTSRANLNKLLTDYTEMKKAILHVYWEEFQKDPVGLMSRVAQPASKKIDQNKLKPEMDEKGNLTTAGFACSQCGQPLFVYKLEQVSEKGKAYTNYFGRCNVAEHEKLILLAQLKPEKDSDEAVTYSLGKFGQRALDFYSIHVTKESTHPVKPLAQIAGNRYASGPVGKALSDACMGTIASFLSKYQDIIIEHQKVVKGNQKRLESLRELAGKENLEYPSVTLPPQPHTKEGVDAYNEVIARVRMWVNLNLWQKLKLSRDDAKPLLRLKGFPSFPLVERQANEVDWWDMVCNVKKLINEKKEDGKVFWQNLAGYKRQEALRPYLSSEEDRKKGKKFARYQLGDLLLHLEKKHGEDWGKVYDEAWERIDKKVEGLSKHIKLEEERRSEDAQSKAALTDWLRAKASFVIEGLKEADKDEFCRCELKLQKWYGDLRGKPFAIEAENSILDISGFSKQYNCAFIWQKDGVKKLNLYLIINYFKGGKLRFKKIKPEAFEANRFYTVINKKSGEIVPMEVNFNFDDPNLIILPLAFGKRQGREFIWNDLLSLETGSLKLANGRVIEKTLYNRRTRQDEPALFVALTFERREVLDSSNIKPMNLIGVDRGENIPAVIALTDPEGCPLSRFKDSLGNPTHILRIGESYKEKQRTIQAKKEVEQRRAGGYSRKYASKAKNLADDMVRNTARDLLYYAVTQDAMLIFENLSRGFGRQGKRTFMAERQYTRMEDWLTAKLAYEGLPSKTYLSKTLAQYTSKTCSNSGFTITSADYDRVLEKLKKTATGWMTTINGKELKVEGQITYYNRYKRQNVVKDLSVELDRLSEESVNNDISSWTKGRSGEALSLLKKRFSHRPVQEKFVCLNCGFETHADEQAALNIARSWLFLRSQEYKKYQTNKTTGNTDKRAFVETWQSFYRKKLKEVWKPAV

SEQ ID NO: 27135 - protein, 978 aa, Artificial Sequence
  CasX Variant
QEIKRINKIRRRLVKDSNTKKAGKTGPMKTLLVRVMTPDLRERLENLRKKPENIPQPISNTSRANLNKLLTDYTEMKKAILHVYWEEFQKDPVGLMSRVAQPASKKIDQNKLKPEMDEKGNLTTAGFACSQCGQPLFVYKLEQVSEKGKAYTNYFGRCNVAEHEKLILLAQLKPEKDSDEAVTYSLGKFGQRALDFYSIHVTKESTHPVKPLAQIAGNRYASGPVGKALSDACMGTIASFLSKYQDIIIEHQKVVKGNQKRLESLRELAGKENLEYPSVTLPPQPHTKEGVDAYNEVIARVRMWVNLNLWQKLKLSRDDAKPLLRLKGFPSFPLVERQANEVDWWDMVCNVKKLINEKKEDGKVFWQNLAGYKRQEALRPYLSSEEDRKKGKKFARYQLGDLLLHLEKKHGEDWGKVYDEAWERIDKKVEGLSKHIKLEEERRSEDAQSKAALTDWLRAKASFVIEGLKEADKDEFCRCELKLQKWYGDLRGKPFAIEAENSILDISGFSKQYNCAFIWQKDGVKKLNLYLIINYFKGGKLRFKKIKPEAFEANRFYTVINKKSGEIVPMEVNFNFDDPNLIILPLAFGKRQGREFIWNDLLSLETGSLKLANGRVIEKTLYNRRTRQDEPALFVALTFERREVLDSSNIKPMNLIGVDRGENIPAVIALTDPEGCPLSRFKDSLGNPTHILRIGESYKEKQRTIQAKKEVEQRRAGGYSRKYASKAKNLADDMVRNTARDLLYYAVTQDAMLIFENLSRGFGRQGKRTFMAERQYTRMEDWLTAKLAYEGLPSKTYLSKTLSQYTSKTCSNCGFTITSADYDRVLEKLKKTATGWMTTINGKELKVEGQITYYNRYKRQNVVKDLSVELDRLSEESVNNDISSWTKGRSGEALSLLKKRFSHRPVQEKFVCLNCGFETHADEQAALNIARSWLFLRSQEYKKYQTNKTTGNTDKRAFVETWQSFYRKKLKEVWKPAV

SEQ ID NO: 27136 - protein, 979 aa, Artificial Sequence
  CasX Variant
QEIKRINKIRRRLVKDSNTKKAGKTGPMKTLLVRVMTPDLRERLENLRKKPENIPQPISNTSRANLNKLLTDYTEMKKAILHVYWEEFQKDPVGLMSRVAQPASKKIDQNKLKPEMDEKGNLTTAGFACSQCGQPLFVYKLEQVSEKGKAYTNYFGRCNVAEHEKLILLAQLKPEKDSDEAVTYSLGKFGQRALDFYSIHVTKESTHPVKPLAQIAGNRYASGPVGKALSDACMGTIASFLSKYQDIIIEHQKVVKGNQKRLESLRELAGKENLEYPSVTLPPQPHTKEGVDAYNEVIARVRMWVNLNLWQKLKLSRDDAKPLLRLKGFPSFPLVERQANEVDWWDMVCNVKKLINEKKEDGKVFWQNLAGYKRQEALRPYLSSEEDRKKGKKFARYQLGDLLLHLEKKHGEDWGKVYDEAWERIDKKVEGLSKHIKLEEERRSEDAQSKAALTDWLRAKASFVIEGLKEADKDEFCRCELKLQKWYGDLRGKPFAIEAENSILDISGFSKQYNCAFIWQKDGVKKLNLYLIINYFKGGKLRFKKIKPEAFEANRFYTVINKKSGEIVPMEVNFNFDDPNLIILPLAFGKRQGREFIWNDLLSLETGSLKLANGRVIEKTLYNRRTRQDEPALFVALTFERREVLDSSNIKPMNLIGVDRGENIPAVIALTDPEGCPLSRFKDSLGNPTHILRIGESYKEKQRTIQAKKEVEQRRAGGYSRKYASKAKNLADDMVRNTARDLLYYAVTQDAMLIFENLSRGFGRQGKRTFMAERQYTRMEDWLTAKLAYEGLPSKTYRLSKTLAQYTSKTCSNCGFTITSADYDRVLEKLKKTATGWMTTINGKELKVEGQITYYNRYKRQNVVKDLSVELDRLSEESVNNDISSWTKGRSGEALSLLKKRFSHRPVQEKFVCLNCGFETHADEQAALNIARSWLFLRSQEYKKYQTNKTTGNTDKRAFVETWQSFYRKKLKEVWKPAV

SEQ ID NO: 27137 - protein, 978 aa, Artificial Sequence
  CasX Variant
QEIKRINKIRRRLVKDSNTKKAGKTGPMKTLLVRVMTPDLRERLENLRKKPENIPQPISNTSRANLNKLLTDYTEMKKAILHVYWEEFQKDPVGLMSRVAQPASKKIDQNKLKPEMDEKGNLTTAGFACSQCGQPLFVYKLEQVSEKGKAYTNYFGRCNVAEHEKLILLAQLKPEKDSDEAVTYSLGKFGQRALDFYSIHVTKESTHPVKPLAQIAGNRYASGPVGKALSDACMGTIASFLSKYQDIIIEHQKVVKGNQKRLESLRELAGKENLEYPSVTLPPQPHTKEGVDAYNEVIARVRMWVNLNLWQKLKLSRDDAKPLLRLKGFPSFPLVERQANEVDWWDMVCNVKKLINEKKEDGKVFWQNLAGYKRQEALRPYLSSEEDRKKGKKFARYQLGDLLLHLEKKHGEDWGKVYDEAWERIDKKVEGLSKHIKLEEERRSEDAQSKAALTDWLRAKASFVIEGLKEADKDEFCRCELKLQKWYGDLRGKPFAIEAENSILDISGFSKQYNCAFIWQKDGVKKLNLYLIINYFKGGKLRFKKIKPEAFEANRFYTVINKKSGEIVPMEVNFNFDDPNLIILPLAFGKRQGREFIWNDLLSLETGSLKLANGRVIEKTLYNRRTRQDEPALFVALTFERREVLDSSNIKPMNLIGVDRGENIPAVIALTDPEGCPLSRFKDSLGNPTHILRIGESYKEKQRTIQAKKEVEQRRAGGYSRKYASKAKNLADDMVRNTARDLLYYAVTQDAMLIFENLSRGFGRQGKRTFMAERQYTRMEDWLTAKRAYEGLPSKTYLSKTLAQYTSKTCSNCGFTITSADYDRVLEKLKKTATGWMTTINGKELKVEGQITYYNRYKRQNVVKDLSVELDRLSEESVNNDISSWTKGRSGEALSLLKKRFSHRPVQEKFVCLNCGFETHADEQAALNIARSWLFLRSQEYKKYQTNKTTGNTDKRAFVETWQSFYRKKLKEVWKPAV

SEQ ID NO: 27138 - protein, 978 aa, Artificial Sequence
  CasX Variant
QEIKRINKIRRRLVKDSNTKKAGKTGPMKTLLVRVMTPDLRERLENLRKKPENIPQPISNTSRANLNKLLTDYTEMKKAILHVYWEEFQKDPVGLMSRVAQPASKKIDQNKLKPEMDEKGNLTTAGFACSQCGQPLFVYKLEQVSEKGKAYTNYFGRCNVAEHEKLILLAQLKPEKDSDEAVTYSLGKFGQRALDFYSIHVTKESTHPVKPLAQIAGNRYASGPVGKALSDACMGTIASFLSKYQDIIIEHQKVVKGNQKRLESLRELAGKENLEYPSVTLPPQPHTKEGVDAYNEVIARVRMWVNLNLWQKLKLSRDDAKPLLRLKGFPSFPLVERQANEVDWWDMVCNVKKLINEKKEDGKVFWQNLAGYKRQEALRPYLSSEEDRKKGKKFARYQLGDLLLHLEKKHGEDWGKVYDEAWERIDKKVEGLSKHIKLEEERRSEDAQSKAALTDWLRAKASFVIEGLKEADKDEFCRCELKLQKWYGDLRGKPFAIEAENSILDISGFSKQYNCAFIWQKDGVKKLNLYLIINYFKGGKLRFKKIKPEAFEANRFYTVINKKSGEIVPMEVNFNFDDPNLIILPLAFGKRQGREFIWNDLLSLETGSLKLANGRVIEKTLYNRRTRQDEPALFVALTFERREVLDSSNIKPMNLIGVDRGENIPAVIALTDPEGCPLSRFKDSLGNPTHILRIGESYKEKQRTIQAKKEVEQRRAGGYSRKYASKAKNLADDMVRNTARDLLYYAVTQDAMLIFENLSRGFGRQGKRTFMAERQYTRMEDWLTAKDAYEGLPSKTYLSKTLAQYTSKTCSNCGFTITSADYDRVLEKLKKTATGWMTTINGKELKVEGQITYYNRYKRQNVVKDLSVELDRLSEESVNNDISSWTKGRSGEALSLLKKRFSHRPVQEKFVCLNCGFETHADEQAALNIARSWLFLRSQEYKKYQTNKTTGNTDKRAFVETWQSFYRKKLKEVWKPAV

SEQ ID NO: 27139 - protein, 978 aa, Artificial Sequence
  CasX Variant
QEIKRINKIRRRLVKDSNTKKAGKTGPMKTLLVRVMTPDLRERLENLRKKPENIPQPISNTSRANLNKLLTDYTEMKKAILHVYWEEFQKDPVGLMSRVAQPASKKIDQNKLKPEMDEKGNLTTAGFACSQCGQPLFVYKLEQVSEKGKAYTNYFGRCNVAEHEKLIQLAQLKPEKDSDEAVTYSLGKFGQRALDFYSIHVTKESTHPVKPLAQIAGNRYASGPVGKALSDACMGTIASFLSKYQDIIIEHQKVVKGNQKRLESLRELAGKENLEYPSVTLPPQPHTKEGVDAYNEVIARVRMWVNLNLWQKLKLSRDDAKPLLRLKGFPSFPLVERQANEVDWWDMVCNVKKLINEKKEDGKVFWQNLAGYKRQEALRPYLSSEEDRKKGKKFARYQLGDLLLHLEKKHGEDWGKVYDEAWERIDKKVEGLSKHIKLEEERRSEDAQSKAALTDWLRAKASFVIEGLKEADKDEFCRCELKLQKWYGDLRGKPFAIEAENSILDISGFSKQYNCAFIWQKDGVKKLNLYLIINYFKGGKLRFKKIKPEAFEANRFYTVINKKSGEIVPMEVNFNFDDPNLIILPLAFGKRQGREFIWNDLLSLETGSLKLANGRVIEKTLYNRRTRQDEPALFVALTFERREVLDSSNIKPMNLIGVDRGENIPAVIALTDPEGCPLSRFKDSLGNPTHILRIGESYKEKQRTIQAKKEVEQRRAGGYSRKYASKAKNLADDMVRNTARDLLYYAVTQDAMLIFENLSRGFGRQGKRTFMAERQYTRMEDWLTAKLAYEGLPSKTYLSKTLAQYTSKTCSNCGFTITSADYDRVLEKLKKTATGWMTTINGKELKVEGQITYYNRYKRQNVVKDLSVELDRLSEESVNNDISSWTKGRSGEALSLLKKRFSHRPVQEKFVCLNCGFETHADEQAALNIARSWLFLRSQEYKKYQTNKTTGNTDKRAFVETWQSFYRKKLKEVWKPAV

SEQ ID NO: 27140 - protein, 978 aa, Artificial Sequence
  CasX Variant
QEIKRINKIRRRLVKDSNTKKAGKTGPMKTLLVRVMTPDLRERLENLRKKPENIPQPISNTSRANLNKLLTDYTEMKKAILHVYWEEFQKDPVGLMSRVAQPASKKIDQNKLKPEMDEKGNLTTAGFACSQCGQPLFVYKLEQVSEKGKAYTNYFGRCNVAEHEKLILLAQLKPEKDSDEAVTYSLGKFGQRALDFYSIHVTKESTHPVKPLAQIAGNRYMSGPVGKALSDACMGTIASFLSKYQDIIIEHQKVVKGNQKRLESLRELAGKENLEYPSVTLPPQPHTKEGVDAYNEVIARVRMWVNLNLWQKLKLSRDDAKPLLRLKGFPSFPLVERQANEVDWWDMVCNVKKLINEKKEDGKVFWQNLAGYKRQEALRPYLSSEEDRKKGKKFARYQLGDLLLHLEKKHGEDWGKVYDEAWERIDKKVEGLSKHIKLEEERRSEDAQSKAALTDWLRAKASFVIEGLKEADKDEFCRCELKLQKWYGDLRGKPFAIEAENSILDISGFSKQYNCAFIWQKDGVKKLNLYLIINYFKGGKLRFKKIKPEAFEANRFYTVINKKSGEIVPMEVNFNFDDPNLIILPLAFGKRQGREFIWNDLLSLETGSLKLANGRVIEKTLYNRRTRQDEPALFVALTFERREVLDSSNIKPMNLIGVDRGENIPAVIALTDPEGCPLSRFKDSLGNPTHILRIGESYKEKQRTIQAKKEVEQRRAGGYSRKYASKAKNLADDMVRNTARDLLYYAVTQDAMLIFENLSRGFGRQGKRTFMAERQYTRMEDWLTAKLAYEGLPSKTYLSKTLAQYTSKTCSNCGFTITSADYDRVLEKLKKTATGWMTTINGKELKVEGQITYYNRYKRQNVVKDLSVELDRLSEESVNNDISSWTKGRSGEALSLLKKRFSHRPVQEKFVCLNCGFETHADEQAALNIARSWLFLRSQEYKKYQTNKTTGNTDKRAFVETWQSFYRKKLKEVWKPAV

SEQ ID NO: 27141 - protein, 978 aa, Artificial Sequence
  CasX Variant
QEIKRINKIRRRLVKDSNTKKAGKTGPMKTLLVRVMTPDLRERLENLRKKPENIPQPISNTSRANLNKLLTDYTEMKKAILHVYWEEFQKDPVGLMSRVAQPASKKIDQNKLKPEMDEKGNLTTAGFACSQCGQPLFVYKLEQVSEKGKAYTNYFGRCNVAEHEKLILLAQLKPEKDSDEAVTYSLGKFGQRALDFYSIHVTKESTHPVKPLAQIAGNRYASGPVGKALSDACMGTIASFLSKYQDIIIEHQKVVKGNQKRLESLRELAGKENLEYPSVTLPPQPHTKEGVDAYNEVIARVRMWVNLNLWQKLKLSRDDAKPLLRLKGFPSFPLVERQANEVDWWDMVCNVKKLINEKKEDGKVFWQNLAIYKRQEALRPYLSSEEDRKKGKKFARYQLGDLLLHLEKKHGEDWGKVYDEAWERIDKKVEGLSKHIKLEEERRSEDAQSKAALTDWLRAKASFVIEGLKEADKDEFCRCELKLQKWYGDLRGKPFAIEAENSILDISGFSKQYNCAFIWQKDGVKKLNLYLIINYFKGGKLRFKKIKPEAFEANRFYTVINKKSGEIVPMEVNFNFDDPNLIILPLAFGKRQGREFIWNDLLSLETGSLKLANGRVIEKTLYNRRTRQDEPALFVALTFERREVLDSSNIKPMNLIGVDRGENIPAVIALTDPEGCPLSRFKDSLGNPTHILRIGESYKEKQRTIQAKKEVEQRRAGGYSRKYASKAKNLADDMVRNTARDLLYYAVTQDAMLIFENLSRGFGRQGKRTFMAERQYTRMEDWLTAKLAYEGLPSKTYLSKTLAQYTSKTCSNCGFTITSADYDRVLEKLKKTATGWMTTINGKELKVEGQITYYNRYKRQNVVKDLSVELDRLSEESVNNDISSWTKGRSGEALSLLKKRFSHRPVQEKFVCLNCGFETHADEQAALNIARSWLFLRSQEYKKYQTNKTTGNTDKRAFVETWQSFYRKKLKEVWKPAV

SEQ ID NO: 27142 - protein, 979 aa, Artificial Sequence
  CasX Variant
QEIKRINKIRRRLVKDSNTKKAGKTGPMKTLLVRVMTPDLRERLENLRKKPENIPQPISNTSRANLNKLLTDYTEMKKAILHVYWEEFQKDPVGLMSRVAQPASKKIDQNKLKPEMDEKGNLTTAGFACSQCGQPLFVYKLEQVSEKGKAYTNYFGRCNVAEHEKLILLAQLKPEKDSDEAVTYSLGKFGQRALDFYSIHVTKESTHPVKPLAQIAGNRYASGPVGKALSDACMGTIASFLSKYQDIIIEHQKVVKGNQKRLESLRELAGKENLEYPSVTLPPQPHTKEGVDAYNEVIARVRMWVNLNLWQKLKLSRDDAKPLLRLKGFPSFPLVERQANEVDWWDMVCNVKKLINEKKEDGKVFWQNLAGYKRQEALRPYLSSEEDVRKKGKKFARYQLGDLLLHLEKKHGEDWGKVYDEAWERIDKKVEGLSKHIKLEEERRSEDAQSKAALTDWLRAKASFVIEGLKEADKDEFCRCELKLQKWYGDLRGKPFAIEAENSILDISGFSKQYNCAFIWQKDGVKKLNLYLIINYFKGGKLRFKKIKPEAFEANRFYTVINKKSGEIVPMEVNFNFDDPNLIILPLAFGKRQGREFIWNDLLSLETGSLKLANGRVIEKTLYNRRTRQDEPALFVALTFERREVLDSSNIKPMNLIGVDRGENIPAVIALTDPEGCPLSRFKDSLGNPTHILRIGESYKEKQRTIQAKKEVEQRRAGGYSRKYASKAKNLADDMVRNTARDLLYYAVTQDAMLIFENLSRGFGRQGKRTFMAERQYTRMEDWLTAKLAYEGLPSKTYLSKTLAQYTSKTCSNCGFTITSADYDRVLEKLKKTATGWMTTINGKELKVEGQITYYNRYKRQNVVKDLSVELDRLSEESVNNDISSWTKGRSGEALSLLKKRFSHRPVQEKFVCLNCGFETHADEQAALNIARSWLFLRSQEYKKYQTNKTTGNTDKRAFVETWQSFYRKKLKEVWKPAV

SEQ ID NO: 27143 - protein, 978 aa, Artificial Sequence
  CasX Variant
QEIKRINKIRRRLVKDSNTKKAGKTGPMKTLLVRVMTPDLRERLENLRKKPENIPQPISNTSRANLNKLLTDYTEMKKAILHVYWEEFQKDPVGLMSRVAQPASKKIDQNKLKPEMDEKGNLTTAGFACSQCGQPLFVYKLEQVSEKGKAYTNYFGRCNVAEHEKLILLAQLKPEKDSDEAVTYSLGKFGQRALDFYSIHVTKESTHPVKPLAQIAGNRYASGPVGKALSDACMGTIASFLSKYQDIIIEHQKVVKGNQKRLESLRELAGKENLEYPSVTLPPQPHTKEGVDAYNEVIARVRMWVNLNLWQKLKLSRDDAKPLLRLKGFPSFPLVERQANEVDWWDMVCNVKKLINEKKEDGKVFWQNLAGYKRQEALRPYLSSEEDREKGKKFARYQLGDLLLHLEKKHGEDWGKVYDEAWERIDKKVEGLSKHIKLEEERRSEDAQSKAALTDWLRAKASFVIEGLKEADKDEFCRCELKLQKWYGDLRGKPFAIEAENSILDISGFSKQYNCAFIWQKDGVKKLNLYLIINYFKGGKLRFKKIKPEAFEANRFYTVINKKSGEIVPMEVNFNFDDPNLIILPLAFGKRQGREFIWNDLLSLETGSLKLANGRVIEKTLYNRRTRQDEPALFVALTFERREVLDSSNIKPMNLIGVDRGENIPAVIALTDPEGCPLSRFKDSLGNPTHILRIGESYKEKQRTIQAKKEVEQRRAGGYSRKYASKAKNLADDMVRNTARDLLYYAVTQDAMLIFENLSRGFGRQGKRTFMAERQYTRMEDWLTAKLAYEGLPSKTYLSKTLAQYTSKTCSNCGFTITSADYDRVLEKLKKTATGWMTTINGKELKVEGQITYYNRYKRQNVVKDLSVELDRLSEESVNNDISSWTKGRSGEALSLLKKRFSHRPVQEKFVCLNCGFETHADEQAALNIARSWLFLRSQEYKKYQTNKTTGNTDKRAFVETWQSFYRKKLKEVWKPAV

SEQ ID NO: 27144 - protein, 979 aa, Artificial Sequence
  CasX Variant
QEIKRINKIRRRLVKDSNTKKAGKTGPMKTLLVRVMTPDLRERLENLRKKPENIPQPISNTSRANLNKLLTDYTEMKKAILHVYWEEFQKDPVGLMSRVAQPASKKIDQNKLKPEMDEKGNLTTAGFACSQCGQPLFVYKLEQVSEKGKAYTNYFGRCNVAEHEKLILLAQLKPEKDSDEAVTYSLGKFGQRALDFYSIHVTKESTHPVKPLAQIAGNRYASGPVGKALSDACMGTIASFLSKYQDIIIEHQKVVKGNQKRLESLRELAGKENLEYPSVTLPPQPHTKEGVDAYNEVIARVRMWVNLNLWQKLKLSRDDAKPLLRLKGFPSFPLVERQANEVDWWDMVCNVKKLINEKKEDGKVFWQNLAGYKRQEALRPYLSSEEDRKKGKKFARYQLGDLLLHLEKKHGEDWGKVYDEAWERIDKKVEGLSKHIKLEEERRSEDAQSKAALTDWLRAKASFVIEGLKEADKDEMFCRCELKLQKWYGDLRGKPFAIEAENSILDISGFSKQYNCAFIWQKDGVKKLNLYLIINYFKGGKLRFKKIKPEAFEANRFYTVINKKSGEIVPMEVNFNFDDPNLIILPLAFGKRQGREFIWNDLLSLETGSLKLANGRVIEKTLYNRRTRQDEPALFVALTFERREVLDSSNIKPMNLIGVDRGENIPAVIALTDPEGCPLSRFKDSLGNPTHILRIGESYKEKQRTIQAKKEVEQRRAGGYSRKYASKAKNLADDMVRNTARDLLYYAVTQDAMLIFENLSRGFGRQGKRTFMAERQYTRMEDWLTAKLAYEGLPSKTYLSKTLAQYTSKTCSNCGFTITSADYDRVLEKLKKTATGWMTTINGKELKVEGQITYYNRYKRQNVVKDLSVELDRLSEESVNNDISSWTKGRSGEALSLLKKRFSHRPVQEKFVCLNCGFETHADEQAALNIARSWLFLRSQEYKKYQTNKTTGNTDKRAFVETWQSFYRKKLKEVWKPAV

SEQ ID NO: 27145 - protein, 978 aa, Artificial Sequence
  CasX Variant
QEIKRINKIRRRLVKDSNTKKAGKTGPMKTLLVRVMTPDLRERLENLRKKPENIPQPISNTSRANLNKLLTDYTEMKKAILHVYWEEFQKDPVGLMSRVAQPASKKIDQNKLKPEMDEKGNLTTAGFACSQCGQPLFVYKLEQVSEKGKAYTNYFGRCNVAEHEKLILLAQLKPEKDSDEAVTYSLGKFGQRALDFYSIHVTKESTHPVKPLAQIAGNRYASGPVGKALSDACMGTIASFLSKYQDIIIEHQKVVKGNQKRLESLRELAGKENLEYPSVTLPPQPHTKEGVDAYNEVIARVRMWVNLNLWQKLKLSRDDAKPLLRLKGFPSFPLVERQANEVDWWDMVCNVKKLINEKKEDGKVFWQNLAGYKRQEALRPYLSSEEDRKKGKKFARYQLGDLLLHLEKKHGEDWGKVYDEAWERIDKKVEGLSKHIKLEEERRSEDAQSKAALTDWLRAKASFVIEGLKEADKDEFCRCELKLQKWYGDLRGKPFAIEAENSILDISGFSKQYNCAFIWQKDGVKKQNLYLIINYFKGGKLRFKKIKPEAFEANRFYTVINKKSGEIVPMEVNFNFDDPNLIILPLAFGKRQGREFIWNDLLSLETGSLKLANGRVIEKTLYNRRTRQDEPALFVALTFERREVLDSSNIKPMNLIGVDRGENIPAVIALTDPEGCPLSRFKDSLGNPTHILRIGESYKEKQRTIQAKKEVEQRRAGGYSRKYASKAKNLADDMVRNTARDLLYYAVTQDAMLIFENLSRGFGRQGKRTFMAERQYTRMEDWLTAKLAYEGLPSKTYLSKTLAQYTSKTCSNCGFTITSADYDRVLEKLKKTATGWMTTINGKELKVEGQITYYNRYKRQNVVKDLSVELDRLSEESVNNDISSWTKGRSGEALSLLKKRFSHRPVQEKFVCLNCGFETHADEQAALNIARSWLFLRSQEYKKYQTNKTTGNTDKRAFVETWQSFYRKKLKEVWKPAV

SEQ ID NO: 27146 - protein, 978 aa, Artificial Sequence
  CasX Variant
QEIKRINKIRRRLVKDSNTKKAGKTGPMKTLLVRVMTPDLRERLENLRKKPENIPQPISNTSRANLNKLLTDYTEMKKAILHVYWEEFQKDPVGLMSRVAQPASKKIDQNKLKPEMDEKGNLTTAGFACSQCGQPLFVYKLEQVSEKGKAYTNYFGRCNVAEHEKLILLAQLKPEKDSDEAVTYSLGKFGQRALDFYSIHVTKESTHPVKPLAQIAGNRYASGPVGKALSDACMGTIASFLSKYQDIIIEHQKVVKGNQKRLESLRELAGKENLEYPSVTLPPQPHTKEGVDAYNEVIARVRMWVNLNLWQKLKLSRDDAKPLLRLKGFPSFPLVERQANEVDWWDMVCNVKKLINEKKEDGKVFWQNLAGYKRQEALRPYLSSEEDRKKGKKFARYQLGDLLLHLEKKHGEDWGKVYDEAWERIDKKVEGLSKHIKLEEERRSEDAQSKAALTDWLRAKASFVIEGLKEADKDEFCRCELKLQKWYGDLRGKPFAIEAENSILDISGFSKQYNCAFIWQKDGVKKLNLYLIINYFKGGKLRFKKIKPEAFEANRFYTVINKKSGEIVIMEVNFNFDDPNLIILPLAFGKRQGREFIWNDLLSLETGSLKLANGRVIEKTLYNRRTRQDEPALFVALTFERREVLDSSNIKPMNLIGVDRGENIPAVIALTDPEGCPLSRFKDSLGNPTHILRIGESYKEKQRTIQAKKEVEQRRAGGYSRKYASKAKNLADDMVRNTARDLLYYAVTQDAMLIFENLSRGFGRQGKRTFMAERQYTRMEDWLTAKLAYEGLPSKTYLSKTLAQYTSKTCSNCGFTITSADYDRVLEKLKKTATGWMTTINGKELKVEGQITYYNRYKRQNVVKDLSVELDRLSEESVNNDISSWTKGRSGEALSLLKKRFSHRPVQEKFVCLNCGFETHADEQAALNIARSWLFLRSQEYKKYQTNKTTGNTDKRAFVETWQSFYRKKLKEVWKPAV

SEQ ID NO: 27147 - protein, 978 aa, Artificial Sequence
  CasX Variant
QEIKRINKIRRRLVKDSNTKKAGKTGPMKTLLVRVMTPDLRERLENLRKKPENIPQPISNTSRANLNKLLTDYTEMKKAILHVYWEEFQKDPVGLMSRVAQPASKKIDQNKLKPEMDEKGNLTTAGFACSQCGQPLFVYKLEQVSEKGKAYTNYFGRCNVAEHEKLILLAQLKPEKDSDEAVTYSLGKFGQRALDFYSIHVTKESTHPVKPLAQIAGNRYASGPVGKALSDACMGTIASFLSKYQDIIIEHQKVVKGNQKRLESLRELAGKENLEYPSVTLPPQPHTKEGVDAYNEVIARVRMWVNLNLWQKLKLSRDDAKPLLRLKGFPSFPLVERQANEVDWWDMVCNVKKLINEKKEDGKVFWQNLAGYKRQEALRPYLSSEEDRKKGKKFARYQLGDLLLHLEKKHGEDWGKVYDEAWERIDKKVEGLSKHIKLEEERRSEDAQSKAALTDWLRAKASFVIEGLKEADKDEFCRCELKLQKWYGDLRGKPFAIEAENSILDISGFSKQYNCAFIWQKDGVKKLNLYLIINYFKGGKLRFKKIKPEAFEANRFYTVINKKSGEIVPMEVNFNFDDPNLIILPLAFGKRQGREFIWNDLLSLETGSLKLANGRVIEKTLYNRRTRQDEPALFVALTFERREVNDSSNIKPMNLIGVDRGENIPAVIALTDPEGCPLSRFKDSLGNPTHILRIGESYKEKQRTIQAKKEVEQRRAGGYSRKYASKAKNLADDMVRNTARDLLYYAVTQDAMLIFENLSRGFGRQGKRTFMAERQYTRMEDWLTAKLAYEGLPSKTYLSKTLAQYTSKTCSNCGFTITSADYDRVLEKLKKTATGWMTTINGKELKVEGQITYYNRYKRQNVVKDLSVELDRLSEESVNNDISSWTKGRSGEALSLLKKRFSHRPVQEKFVCLNCGFETHADEQAALNIARSWLFLRSQEYKKYQTNKTTGNTDKRAFVETWQSFYRKKLKEVWKPAV

SEQ ID NO: 27148 - protein, 979 aa, Artificial Sequence
  CasX Variant
QEIKRINKIRRRLVKDSNTKKAGKTGPMKTLLVRVMTPDLRERLENLRKKPENIPQPISNTSRANLNKLLTDYTEMKKAILHVYWEEFQKDPVGLMSRVAQPASKKIDQNKLKPEMDEKGNLTTAGFACSQCGQPLFVYKLEQVSEKGKAYTNYFGRCNVAEHEKLILLAQLKPEKDSDEAVTYSLGKFGQRALDFYSIHVTKESTHPVKPLAQIAGNRYASGPVGKALSDACMGTIASFLSKYQDIIIEHQKVVKGNQKRLESLRELAGKENLEYPSVTLPPQPHTKEGVDAYNEVIARVRMWVNLNLWQKLKLSRDDAKPLLRLKGFPSFPLVERQANEVDWWDMVCNVKKLINEKKEDGKVFWQNLAGYKRQEALRPYLSSEEDRKKGKKFARYQLGDLLLHLEKKHGEDWGKVYDEAWERIDKKVEGLSKHIKLEEERRSEDAQSKAALTDWLRAKASFVIEGLKEADKDEFCRCELKLQKWYGDLRGKPFAIEAENSILDISGFSKQYNCAFIWQKDGVKKLNLYLIINYFKGGKLRFKKIKPEAFEANRFYTVINKKSGEIVPMEVNFNFDDPNLIILPLAFGKRQGREFIWNDLLSLETGSLKLANGRVIEKTLYNRRTRQDEPALFVALTFERREVLDSSNIKPMNLIGVDRGENIPAVIALTDPEGCPLSRFKDSLGNPTHILRIGESYKEKQRTIQAKKEVEQRRAGGYSRKYASKAKNLADDMVRNTARDLLYYAVTQDAMLIFENLSRGFGRQGKRTFMAERQYTRMEDWLTAKLAYEGLPSGKTYLSKTLAQYTSKTCSNCGFTITSADYDRVLEKLKKTATGWMTTINGKELKVEGQITYYNRYKRQNVVKDLSVELDRLSEESVNNDISSWTKGRSGEALSLLKKRFSHRPVQEKFVCLNCGFETHADEQAALNIARSWLFLRSQEYKKYQTNKTTGNTDKRAFVETWQSFYRKKLKEVWKPAV

SEQ ID NO: 27149 - protein, 978 aa, Artificial Sequence
  CasX Variant
QEIKRINKIRRRLVKDSNTKKAGKTGPMKTLLVRVMTPDLRERLENLRKKPENIPQPISNTSRANLNKLLTDYTEMKKAILHVYWEEFQKDPVGLMSRVAQPASKKIDQNKLKPEMDEKGNLTTAGFACSQCGQPLFVYKLEQVSEKGKAYTNYFGRCNVAEHEKLILLAQLKPEKDSDEAVTYSLGKFGQRALDFYSIHVTKESTHPVKPLAQIAGNRYASGPVGKALSDACMGTIASFLSKYQDIIIEHQKVVKGNQKRLESLRELAGKENLEYPSVTLPPQPHTKEGVDAYNEVIARVRMWVNLNLWQKLKLSRDDAKPLLRLKGFPSFPLVERQANEVDWWDMVCNVKKLINEKKEDGKVFWQNLAGYKRQEALRPYLSSEEDRKKGKKFARYQLGDLLLHLEKKHGEDWGKVYDEAWERIDKKVEGLSKHIKLEEERRSEDAQSKAALTDWLRAKASFVIEGLKEADKDEFCRCELKLQKWYGDLRGKPFAIEAENSILDISGFSKQYNCAFIWQKDGVKKLNLYLIINYFKGGKLRFKKIKPEAFEANRFYTVINKKSGEIVPMEVNFNFDDPNLIILPLAFGKRQGREFIWNDLLSLETGSLKLANGRVIEKTLYNRRTRQDEPALFVALTFERREVLDSSNIKPMNLIGVDRGENIPAVIALTDPEGCPLSRFKDSLGNPTHILRIGESYKEKQRTIQAKKEVEQRRAGGYSRKYASKAKNLADDMVRNTARDLLYYAVTQDAMLIFENLSRGFGRQGKRTFMAERQYTRMEDWLTAKLAYEGLPSKTYLSKTLAQYTSKTCSNCGFTITSADYDRMLEKLKKTATGWMTTINGKELKVEGQITYYNRYKRQNVVKDLSVELDRLSEESVNNDISSWTKGRSGEALSLLKKRFSHRPVQEKFVCLNCGFETHADEQAALNIARSWLFLRSQEYKKYQTNKTTGNTDKRAFVETWQSFYRKKLKEVWKPAV

SEQ ID NO: 27150 - protein, 978 aa, Artificial Sequence
  CasX Variant
QEIKRINKIRRRLVKDSNTKKAGKTGPMKTLLVRVMTPDLRERLENLRKKPENIPQPISNTSRANLNKLLTDYTEMKKAILHVYWEEFQKDPVGLMSRVAQPASKKIDQNKLKPEMDEKGNLTTAGFACSQCGQPLFVYKLEQVSEKGKAYTNYFGRCNVAEHEKLILLAQLKPEKDSDEAVTYSLGKFGQRALDFYSIHVTKESTHPVKPLAQIAGNRYASGPVGKALSDACMGTIASFLSKYQDIIIEHQKVVKGNQKRLESLRELAGKENLEYPSVTLPPQPHTKEGVDAYNEVIARVRMWVNLNLWQKLKLSRDDAKPLLRLKGFPSFPLVERQANEVDWWDMVCNVKKLINEKKEDGKVFWQNLAGYKRQEALRPYLSSEEDRKKGKKFARYQLGDLLLHLEKKHGEDWGKVYDEAWERIDKKVEGLSKHIKLEEERRSEDAQSKAALTDWLRAKASFVIEGLKEADKDEFCRCELKLQKWYGDLRGKPFAIEAENSILDISGFSKQYNCAFIWQKDGVKKLNLYLIINYFKGGKLRFKKIKPEAFEANRFYTVINKKSGEIVPMEVNFNFDDPNLIILPLAFGKRQGREFIWNDLLSLETGSLKLANGRVIEKTLYNRRTRQDEPALFVALTFERREVLDSSNIKPMNLIGVDRGENIPAVIALTDPEGCPLSRFKDSLGNPTHILRIGESYKEKQRTIQAKKEVEQRRAGGYSRKYASKAKNLADDMVRNTARDLLYYAVTQDAMLIFENLSRGFGRQGKRTFMAERQYTRMEDWLTAKLAYEGLPSKTYLSKTLAQYTSKTCSNCGFTITSADYDRVLEKLKKTATGWMTTINGKELKVEGQITYYNRYKRQNVVKDLSVELDRLSEESVNNDISSWTKGRQGEALSLLKKRFSHRPVQEKFVCLNCGFETHADEQAALNIARSWLFLRSQEYKKYQTNKTTGNTDKRAFVETWQSFYRKKLKEVWKPAV

SEQ ID NO: 27151 - protein, 978 aa, Artificial Sequence
  CasX Variant
QEIKRINKIRRRLVKDSNTKKAGKTGPMKTLLVRVMTPDLRERLENLRKKPENIPQPISNTSRANLNKLLTDYTEMKKAILHVYWEEFQKDPVGLMSRVAQPASKKIDQNKLKPEMDEKGNLTTAGFACSQCGQPLFVYKLEQVSEKGKAYTNYFGRCNVAEHEKLILLAQLKPEKDSDEAVTYSLGKFGQRALDFYSIHVTKESTHPVKPLAQIAGNRYASGPVGKALSDACMGTIASFLSKYQDIIIEHQKVVKGNQKRLESLRELAGKENLEYPSVTLPPQPHTKEGVDAYNEVIARVRMWVNLNLWQKLKLSRDDAKPLLRLKGFPSFPLVERQANEVDWWDMVCNVKKLINEKKEDGKVFWQNLAGYKRQEALRPYLSSEEDRKKGKKFARYQLGDLLLHLEKKHGEDWGKVYDEAWERIDKKVEGLSKHIKLEEERRSEDAQSKAALTDWLRAKASFVIEGLKEADKDEFCRCELKLQKWYGDLRGKPFAIEAENSILDISGFSKQYNCAFIWQKDGVKKLNLYLIINYFKGGKLRFKKIKPEAFEANRFYTVINKKSGEIVPMEVNFNFDDPNLIILPLAFGKRQGREFIWNDLLSLETGSLKLANGRVIEKTLYNRRTRQDEPALFVALTFERREVLDSSNIKPMNLIGVDRGENIPAVIALTDPEGCPLSRFKDSLGNPTHILRIGESYKEKQRTIQAKKEVEQRRAGGYSRKYASKAKNLADDMVRNTARDLLYYAVTQDAMLIFENLSRGFGRQGKRTFMAERQYTRMEDWLTAKLAYEGLPSKTYLSKTLAQYTSKTCSNCGFTITSADYDRVLEKLKKTATGWMTTINGKELKVEGQITYYNRYKRQNVVKDLSVELDRLSEESVNNDISSWTKGRSGEALSLLKKRFSHRPVQEKFVCLNCEFETHADEQAALNIARSWLFLRSQEYKKYQTNKTTGNTDKRAFVETWQSFYRKKLKEVWKPAV

SEQ ID NO: 27152 - protein, 979 aa, Artificial Sequence
  CasX Variant
QEIKRINKIRRRLVKDSNTKKAGKTGPMKTLLVRVMTPDLRERLENLRKKPENIPQPISNTSRANLNKLLTDYTEMKKAILHVYWEEFQKDPVGLMSRVAQPASKKIDQNKLKPEMDEKGNLTTAGFACSQCGQPLFVYKLEQVSEKGKAYTNYFGRCNVAEHEKLILLAQLKPEKDSDEAVTYSLGKFGQRALDFYSIHVTKESTHPVKPLAQIAGNRYASGPVGKALSDACMGTIASFLSKYQDIIIEHQKVVKGNQKRLESLRELAGKENLEYPSVTLPPQPHTKEGVDAYNEVIARVRMWVNLNLWQKLKLSRDDAKPLLRLKGFPSFPLVERQANEVDWWDMVCNVKKLINEKKEDGKVFWQNLAGYKRQEALRPYLSSEEDRKKGKKFARYQLGDLLLHLEKKHGEDWGKVYDEAWERIDKKVEGLSKHIKLEEERRSEDAQSKAALTDWLRAKASFVIEGLKEADKDEFCRCELKLQKWYGDLRGKPFAIEAENSILDISGFSKQYNCAFIWQKDGVKKLNLYLIINYFKGGKLRFKKIKPEAFEANRFYTVINKKSGEIVPMEVNFNFDDPNLIILPLAFGKRQGREFIWNDLLSLETGSLKLANGRVIEKTLYNRRTRQDEPALFVALTFERREVLDSSNIKPMNLIGVDRGENIPAVIALTDPEGCPLSRFKDSLGNPTHILRIGESYKEKQRTIQAKKEVEQRRAGGYSRKYASKAKNLADDMVRNTARDLLYYAVTQDAMLIFENLSRGFGRQGKRTFMAERQYTRMEDWLTAKLAYEGLPSKTYLSKTLAQYTSKTCSNCGFTITSADYDRVLEKLKKTATGWMTTINGKELKVEGQITYYNRYKRQNVVKDLSVELDRLSEESVNNDISSWTKGRSGEALSLLKKRFSHRPVQEKFVCLNCGFETHADEQAALNIARSWLFLRSQEYKKYQTNKTSTGNTDKRAFVETWQSFYRKKLKEVWKPAV

SEQ ID NO: 27153 - protein, 979 aa, Artificial Sequence
  CasX Variant
QEIKRINKIRRRLVKDSNTKKAGKTGPMKTLLVRVMTPDLRERLENLRKKPENIPQPISNTSRANLNKLLTDYTEMKKAILHVYWEEFQKDPVGLMSRVAQPASKKIDQNKLKPEMDEKGNLTTAGFACSQCGQPLFVYKLEQVSEKGKAYTNYFGRCNVAEHEKLILLAQLKPEKDSDEAVTYSLGKFGQRALDFYSIHVTKESTHPVKPLAQIAGNRYASGPVGKALSDACMGTIASFLSKYQDIIIEHQKVVKGNQKRLESLRELAGKENLEYPSVTLPPQPHTKEGVDAYNEVIARVRMWVNLNLWQKLKLSRDDAKPLLRLKGFPSFPLVERQANEVDWWDMVCNVKKLINEKKEDGKVFWQNLAGYKRQEALRPYLSSEEDRKKGKKFARYQLGDLLLHLEKKHGEDWGKVYDEAWERIDKKVEGLSKHIKLEEERRSEDAQSKAALTDWLRAKASFVIEGLKEADKDEFCRCELKLQKWYGDLRGKPFAIEAENSILDISGFSKQYNCAFIWQKDGVKKLNLYLIINYFKGGKLRFKKIKPEAFEANRFYTVINKKSGEIVPMEVNFNFDDPNLIILPLAFGKRQGREFIWNDLLSLETGSLKLANGRVIEKTLYNRRTRQDEPALFVALTFERREVLDSSNIKPMNLIGVDRGENIPAVIALTDPEGCPLSRFKDSLGNPTHILRIGESYKEKQRTIQAKKEVEQRRAGGYSRKYASKAKNLADDMVRNTARDLLYYAVTQDAMLIFENLSRGFGRQGKRTFMAERQYTRMEDWLTAKLAYEGLPSKTYLSKTLAQYTSKTCSNCGFTITSADYDRVLEKLKKTATGWMTTINGKELKVEGQITYYNRYKRQNVVKDLSVELDRLSEESVNNDISSWTKGRSGEALSLLKKRFSHRPVQEKFVCLNCGFETHADEQAALNIARSWLFLRSQEYKKYQTNKTTGKNTDKRAFVETWQSFYRKKLKEVWKPAV

SEQ ID NO: 27154 - protein, 979 aa, Artificial Sequence
  CasX Variant
QEIKRINKIRRRLVKDSNTKKAGKTRGPMKTLLVRVMTPDLRERLENLRKKPENIPQPISNTSRANLNKLLTDYTEMKKAILHVYWEEFQKDPVGLMSRVAQPASKKIDQNKLKPEMDEKGNLTTAGFACSQCGQPLFVYKLEQVSEKGKAYTNYFGRCNVAEHEKLILLAQLKPEKDSDEAVTYSLGKFGQRALDFYSIHVTKESTHPVKPLAQIAGNRYASSPVGKALSGACMGTIASFLSKYQDIIIEHQKVVKGNQKRLESLRELAGKENLEYPSVTLPPQPHTKEGVDAYNEVIARVRMWVNLNLWQKLKLSRDDAKPLLRLKGFPSFPLVERQANEVDWWDMVCNVKKLINEKKEDGKVFWQNLAGYKRQEALRPYLSSEEDRKKGKKFARYQLGDLLLHLEKKHGEDWGKVYDEAWERIDKKVEGLSKHIKLEEERRSEDAQSKAALTDWLRAKASFVIEGLKEADKDEFCRCELKLQKWYGDLRGKPFAIEAENSILDISGFSKQYNCAFIWQKDGVKKLNLYLIINYFKGGKLRFKKIKPEAFEANRFYTVINKKSGEIVPMEVNFNFDDPNLIILPLAFGKRQGREFIWNDLLSLETGSLKLANGRVIEKTLYNRRTRQDEPALFVALTFERREVLDSSNIKPMNLIGVDRGENIPAVIALTDPEGCPLSRFKDSLGNPTHILRIGESYKEKQRTIQAKKEVEQRRAGGYSRKYASKAKNLADDMVRNTARDLLYYAVTQDAMLIFENLSRGFGRQGKRTFMAERQYTRMEDWLTAKLAYEGLPSKTYLSKTLAQYTSKTCSNCGFTITSADYDRVLEKLKKTATGWMTTINGKELKVEGQITYYNRYKRQNVVKDLSVELDRLSEESVNNDISSWTKGRSGEALSLLKKRFSHRPVQEKFVCLNCGFETHADEQAALNIARSWLFLRSQEYKKYQTNKTTGNTDKRAFVETWQSFYRKKLKEVWKPAV

SEQ ID NO: 27155 - DNA, 2931 bp, Artificial Sequence
  CasX Variant
caagagatcaagagaatcaacaagatcagaaggagactggtcaaggacagcaacacaaagaaggccggcaagacaggccccatgaaaaccctgctcgtcagagtgatgacccctgacctgagagagcggctggaaaacctgagaaagaagcccgagaacatccctcagcctatcagcaacaccagcagggccaacctgaacaagctgctgaccgactacaccgagatgaagaaagccatcctgcacgtgtactgggaagagttccagaaagaccccgtgggcctgatgagcagagttgctcagcctgccagcaagaagatcgaccagaacaagctgaagcccgagatggacgagaagggcaatctgaccacagccggctttgcctgctctcagtgtggccagcctctgttcgtgtacaagctggaacaggtgtccgagaaaggcaaggcctacaccaactacttcggcagatgtaacgtggccgagcacgagaagctgattctgctggcccagctgaaacctgagaaggactctgatgaggccgtgacctacagcctgggcaagtttggacagagagccctggacttctacagcatccacgtgaccaaagaaagcacacaccccgtgaagcccctggctcagatcgccggcaatagatacgcctctggacctgtgggcaaagccctgtccgatgcctgcatgggaacaatcgccagcttcctgagcaagtaccaggacatcatcatcgagcaccagaaggtggtcaagggcaaccagaagagactggaaagcctgagggagctggccggcaaagagaacctggaataccccagcgtgaccctgcctcctcagcctcacacaaaagaaggcgtggacgcctacaacgaagtgatcgccagagtgagaatgtgggtcaacctgaacctgtggcagaagctgaaactgtccagggacgacgccaagcctctgctgagactgaagggcttccctagcttccctctggtggaaagacaggccaatgaagtggattggtgggacatggtctgcaacgtgaagaagctgatcaacgagaagaaagaggatggcaaggttttctggcagaacctggccggctacaagagacaagaagccctgaggccttacctgagcagcgaagaggaccggaagaagggcaagaagttcgccagataccagttcggcgacctgctgctgcacctggaaaagaagcacggcgaggactggggcaaagtgtacgatgaggcctgggagagaatcgacaagaaggtggaaggcctgagcaagcacattaagctggaagaggaaagaaggagcgaggacgcccaatctaaagccgctctgaccgattggctgagagccaaggccagctttgtgatcgagggcctgaaagaggccgacaaggacgagttctgcagatgcgagctgaagctgcagaagtggtacggcgatctgagaggcaagcccttcgccattgaggccgagaacagcatcctggacatcagcggcttcagcaagcagtacaactgcgccttcatttggcagaaagacggcgtcaagaaactgaacctgtacctgatcatcaattacttcaaaggcggcaagctgcggttcaagaagatcaaacccgaggccttcgaggctaacagattctacaccgtgatcaacaaaaagtccggcgagatcgtgcccatggaagtgaacttcaacttcgacgaccccaacctgattatcctgcctctggccttcggcaagagacagggcagagagttcatctggaacgatctgctgagcctggaaaccggctctctgaagctggccaatggcagagtgatcgagaaaaccctgtacaacaggagaaccagacaggacgagcctgctctgtttgtggccctgaccttcgagagaagagaggtgctggacagcagcaacatcaagcccatgaacctgatcggcatcgaccggggcgagaatatccctgctgtgatcgccctgacagaccctgaaggatgcccactgagcagattcaaggactccctgggcaaccctacacacatcctgagaatcggcgagagctacaaagagaagcagaggacaatccaggccaagaaagaggtggaacagagaagagccggcggatactctaggaagtacgccagcaaggccaagaatctggccgacgacatggtccgaaacaccgccagagatctgctgtactacgccgtgacacaggacgccatgctgatcttcgagaatctgagcagaggcttcggccggcagggcaagagaacctttatggccgagaggcagtacaccagaatggaagattggctcacagctaaactggcctacgagggactgagcaagacctacctgtccaaaacactggcccagtatacctccaagacctgcagcaattgcggcttcaccatcaccagcgccgactacgacagagtgctggaaaagctcaagaaaaccgccaccggctggatgaccaccatcaacggcaaagagctgaaggttgagggccagatcacctactacaacaggtacaagaggcagaacgtcgtgaaggatctgagcgtggaactggacagactgagcgaagagagcgtgaacaacgacatcagcagctggacaaagggcagatcaggcgaggctctgagcctgctgaagaagaggtttagccacagacctgtgcaagagaagttcgtgtgcctgaactgcggcttcgagacacacgccgatgaacaggctgccctgaacattgccagaagctggctgttcctgagaagccaagagtacaagaagtaccagaccaacaagaccaccggcaacaccgacaagagggcctttgtggaaacctggcagagcttctacagaaaaaagctgaaagaagtctggaagcccgccgtg

SEQ ID NO: 27156 - DNA, 2931 bp, Artificial Sequence
  CasX Variant
caagagatcaagagaatcaacaagatcagaaggagactggtcaaggacagcaacacaaagaaggccggcaagacaggccccatgaaaaccctgctcgtcagagtgatgacccctgacctgagagagcggctggaaaacctgagaaagaagcccgagaacatccctcagcctatcagcaacaccagcagggccaacctgaacaagctgctgaccgactacaccgagatgaagaaagccatcctgcacgtgtactgggaagagttccagaaagaccccgtgggcctgatgagcagagttgctcagcctgccagcaagaagatcgaccagaacaagctgaagcccgagatggacgagaagggcaatctgaccacagccggctttgcctgctctcagtgtggccagcctctgttcgtgtacaagctggaacaggtgtccgagaaaggcaaggcctacaccaactacttcggcagatgtaacgtggccgagcacgagaagctgattctgctggcccagctgaaacctgagaaggactctgatgaggccgtgacctacagcctgggcaagtttggacagagagccctggacttctacagcatccacgtgaccaaagaaagcacacaccccgtgaagcccctggctcagatcgccggcaatagatacgcctctggacctgtgggcaaagccctgtccgatgcctgcatgggaacaatcgccagcttcctgagcaagtaccaggacatcatcatcgagcaccagaaggtggtcaagggcaaccagaagagactggaaagcctgagggagctggccggcaaagagaacctggaataccccagcgtgaccctgcctcctcagcctcacacaaaagaaggcgtggacgcctacaacgaagtgatcgccagagtgagaatgtgggtcaacctgaacctgtggcagaagctgaaactgtccagggacgacgccaagcctctgctgagactgaagggcttccctagcttccctctggtggaaagacaggccaatgaagtggattggtgggacatggtctgcaacgtgaagaagctgatcaacgagaagaaagaggatggcaaggttttctggcagaacctggccggctacaagagacaagaagccctgaggccttacctgagcagcgaagaggaccggaagaagggcaagaagttcgccagataccagctgggcgacctgctgctgcacctggaaaagaagcacggcgaggactggggcaaagtgtacgatgaggcctgggagagaatcgacaagaaggtggaaggcctgagcaagcacattaagctggaagaggaaagaaggagcgaggacgcccaatctaaagccgctctgaccgattggctgagagccaaggccagctttgtgatcgagggcctgaaagaggccgacaaggacgagttctgcagatgcgagctgaagctgcagaagtggtacggcgatctgagaggcaagcccttcgccattgaggccgagaacagcatcctggacatcagcggcttcagcaagcagtacaactgcgccttcatttggcagaaagacggcgtcaagaaactgaacctgtacctgatcatcaattacttcaaaggcggcaagctgcggttcaagaagatcaaacccgaggccttcgaggctaacagattctacaccgtgatcaacaaaaagtccggcgagatcgtgcccatggaagtgaacttcaacttcgacgaccccaacctgattatcctgcctctggccttcggcaagagacagggcagagagttcatctggaacgatctgctgagcctggaaaccggctctctgaagctggccaatggcagagtgatcgagaaaaccctgtacaacaggagaaccagacaggacgagcctgctctgtttgtggccctgaccttcgagagaagagaggtgctggacagcagcaacatcaagcccatgaacctgatcggcgtggaccggggcgagaatatccctgctgtgatcgccctgacagaccctgaaggatgcccactgagcagattcaaggactccctgggcaaccctacacacatcctgagaatcggcgagagctacaaagagaagcagaggacaatccaggccaagaaagaggtggaacagagaagagccggcggatactctaggaagtacgccagcaaggccaagaatctggccgacgacatggtccgaaacaccgccagagatctgctgtactacgccgtgacacaggacgccatgctgatcttcgagaatctgagcagaggcttcggccggcagggcaagagaacctttatggccgagaggcagtacaccagaatggaagattggctcacagctaaactggcctacgagggactgagcaagacctacctgtccaaaacactggcccagtatacctccaagacctgcagcaattgcggcttcaccatcaccagcgccgactacgacagagtgctggaaaagctcaagaaaaccgccaccggctggatgaccaccatcaacggcaaagagctgaaggttgagggccagatcacctactacaacaggtacaagaggcagaacgtcgtgaaggatctgagcgtggaactggacagactgagcgaagagagcgtgaacaacgacatcagcagctggacaaagggcagatcaggcgaggctctgagcctgctgaagaagaggtttagccacagacctgtgcaagagaagttcgtgtgcctgaactgcggcttcgagacacacgccgatgaacaggctgccctgaacattgccagaagctggctgttcctgagaagccaagagtacaagaagtaccagaccaacaagaccaccggcaacaccgacaagagggcctttgtggaaacctggcagagcttctacagaaaaaagctgaaagaagtctggaagcccgccgtg

SEQ ID NO: 27157 - DNA, 2934 bp, Artificial Sequence
  CasX Variant
caagagatcaagagaatcaacaagatcagaaggagactggtcaaggacagcaacacaaagaaggccggcaagacaggccccatgaaaaccctgctcgtcagagtgatgacccctgacctgagagagcggctggaaaacctgagaaagaagcccgagaacatccctcagcctatcagcaacaccagcagggccaacctgaacaagctgctgaccgactacaccgagatgaagaaagccatcctgcacgtgtactgggaagagttccagaaagaccccgtgggcctgatgagcagagttgctcagcctgccagcaagaagatcgaccagaacaagctgaagcccgagatggacgagaagggcaatctgaccacagccggctttgcctgctctcagtgtggccagcctctgttcgtgtacaagctggaacaggtgtccgagaaaggcaaggcctacaccaactacttcggcagatgtaacgtggccgagcacgagaagctgattctgctggcccagctgaaacctgagaaggactctgatgaggccgtgacctacagcctgggcaagtttggacagagagccctggacttctacagcatccacgtgaccaaagaaagcacacaccccgtgaagcccctggctcagatcgccggcaatagatacgcctctggacctgtgggcaaagccctgtccgatgcctgcatgggaacaatcgccagcttcctgagcaagtaccaggacatcatcatcgagcaccagaaggtggtcaagggcaaccagaagagactggaaagcctgagggagctggccggcaaagagaacctggaataccccagcgtgaccctgcctcctcagcctcacacaaaagaaggcgtggacgcctacaacgaagtgatcgccagagtgagaatgtgggtcaacctgaacctgtggcagaagctgaaactgtccagggacgacgccaagcctctgctgagactgaagggcttccctagcttccctctggtggaaagacaggccaatgaagtggattggtgggacatggtctgcaacgtgaagaagctgatcaacgagaagaaagaggatggcaaggttttctggcagaacctggccggctacaagagacaagaagccctgaggccttacctgagcagcgaagaggaccggaagaagggcaagaagttcgccagataccagctgggcgacctgctgctgcacctggaaaagaagcacggcgaggactggggcaaagtgtacgatgaggcctgggagagaatcgacaagaaggtggaaggcctgagcaagcacattaagctggaagaggaaagaaggagcgaggacgcccaatctaaagccgctctgaccgattggctgagagccaaggccagctttgtgatcgagggcctgaaagaggccgacaaggacgagttctgcagatgcgagctgaagctgcagaagtggtacggcgatctgagaggcaagcccttcgccattgaggccgagaacagcatcctggacatcagcggcttcagcaagcagtacaactgcgccttcatttggcagaaagacggcgtcaagaaactgaacctgtacctgatcatcaattacttcaaaggcggcaagctgcggttcaagaagatcaaacccgaggccttcgaggctaacagattctacaccgtgatcaacaaaaagtccggcgagatcgtgcccatggaagtgaacttcaacttcgacgaccccaacctgattatcctgcctctggccttcggcaagagacagggcagagagttcatctggaacgatctgctgagcctggaaaccggctctctgaagctggccaatggcagagtgatcgagaaaaccctgtacaacaggagaaccagacaggacgagcctgctctgtttgtggccctgaccttcgagagaagagaggtgctggacagcagcaacatcaagcccatgaacctgatcggcgtggaccggggcgagaatatccctgctgtgatcgccctgacagaccctgaaggatgcccactgagcagattcaaggactccctgggcaaccctacacacatcctgagaatcggcgagagctacaaagagaagcagaggacaatccaggccaagaaagaggtggaacagagaagagccggcggatactctaggaagtacgccagcaaggccaagaatctggccgacgacatggtccgaaacaccgccagagatctgctgtactacgccgtgacacaggacgccatgctgatcttcgagaatctgagcagaggcttcggccggcagggcaagagaacctttatggccgagaggcagtacaccagaatggaagattggctcacagctaaactggcctacgagggactgcccagcaagacctacctgtccaaaacactggcccagtatacctccaagacctgcagcaattgcggcttcaccatcaccagcgccgactacgacagagtgctggaaaagctcaagaaaaccgccaccggctggatgaccaccatcaacggcaaagagctgaaggttgagggccagatcacctactacaacaggtacaagaggcagaacgtcgtgaaggatctgagcgtggaactggacagactgagcgaagagagcgtgaacaacgacatcagcagctggacaaagggcagatcaggcgaggctctgagcctgctgaagaagaggtttagccacagacctgtgcaagagaagttcgtgtgcctgaactgcggcttcgagacacacgccgatgaacaggctgccctgaacattgccagaagctggctgttcctgagaagccaagagtacaagaagtaccagaccaacaagaccaccggcaacaccgacaagagggcctttgtggaaacctggcagagcttctacagaaaaaagctgaaagaagtctggaagcccgccgtg

SEQ ID NO: 27158 - DNA, 2934 bp, Artificial Sequence
  CasX Variant
caagagatcaagagaatcaacaagatcagaaggagactggtcaaggacagcaacacaaagaaggccggcaagacacggggccccatgaaaaccctgctcgtcagagtgatgacccctgacctgagagagcggctggaaaacctgagaaagaagcccgagaacatccctcagcctatcagcaacaccagcagggccaacctgaacaagctgctgaccgactacaccgagatgaagaaagccatcctgcacgtgtactgggaagagttccagaaagaccccgtgggcctgatgagcagagttgctcagcctgccagcaagaagatcgaccagaacaagctgaagcccgagatggacgagaagggcaatctgaccacagccggctttgcctgctctcagtgtggccagcctctgttcgtgtacaagctggaacaggtgtccgagaaaggcaaggcctacaccaactacttcggcagatgtaacgtggccgagcacgagaagctgattctgctggcccagctgaaacctgagaaggactctgatgaggccgtgacctacagcctgggcaagtttggacagagagccctggacttctacagcatccacgtgaccaaagaaagcacacaccccgtgaagcccctggctcagatcgccggcaatagatacgcctctggacctgtgggcaaagccctgtccgatgcctgcatgggaacaatcgccagcttcctgagcaagtaccaggacatcatcatcgagcaccagaaggtggtcaagggcaaccagaagagactggaaagcctgagggagctggccggcaaagagaacctggaataccccagcgtgaccctgcctcctcagcctcacacaaaagaaggcgtggacgcctacaacgaagtgatcgccagagtgagaatgtgggtcaacctgaacctgtggcagaagctgaaactgtccagggacgacgccaagcctctgctgagactgaagggcttccctagcttccctctggtggaaagacaggccaatgaagtggattggtgggacatggtctgcaacgtgaagaagctgatcaacgagaagaaagaggatggcaaggttttctggcagaacctggccggctacaagagacaagaagccctgaggccttacctgagcagcgaagaggaccggaagaagggcaagaagttcgccagataccagctgggcgacctgctgctgcacctggaaaagaagcacggcgaggactggggcaaagtgtacgatgaggcctgggagagaatcgacaagaaggtggaaggcctgagcaagcacattaagctggaagaggaaagaaggagcgaggacgcccaatctaaagccgctctgaccgattggctgagagccaaggccagctttgtgatcgagggcctgaaagaggccgacaaggacgagttctgcagatgcgagctgaagctgcagaagtggtacggcgatctgagaggcaagcccttcgccattgaggccgagaacagcatcctggacatcagcggcttcagcaagcagtacaactgcgccttcatttggcagaaagacggcgtcaagaaactgaacctgtacctgatcatcaattacttcaaaggcggcaagctgcggttcaagaagatcaaacccgaggccttcgaggctaacagattctacaccgtgatcaacaaaaagtccggcgagatcgtgcccatggaagtgaacttcaacttcgacgaccccaacctgattatcctgcctctggccttcggcaagagacagggcagagagttcatctggaacgatctgctgagcctggaaaccggctctctgaagctggccaatggcagagtgatcgagaaaaccctgtacaacaggagaaccagacaggacgagcctgctctgtttgtggccctgaccttcgagagaagagaggtgctggacagcagcaacatcaagcccatgaacctgatcggcgtggaccggggcgagaatatccctgctgtgatcgccctgacagaccctgaaggatgcccactgagcagattcaaggactccctgggcaaccctacacacatcctgagaatcggcgagagctacaaagagaagcagaggacaatccaggccaagaaagaggtggaacagagaagagccggcggatactctaggaagtacgccagcaaggccaagaatctggccgacgacatggtccgaaacaccgccagagatctgctgtactacgccgtgacacaggacgccatgctgatcttcgagaatctgagcagaggcttcggccggcagggcaagagaacctttatggccgagaggcagtacaccagaatggaagattggctcacagctaaactggcctacgagggactgagcaagacctacctgtccaaaacactggcccagtatacctccaagacctgcagcaattgcggcttcaccatcaccagcgccgactacgacagagtgctggaaaagctcaagaaaaccgccaccggctggatgaccaccatcaacggcaaagagctgaaggttgagggccagatcacctactacaacaggtacaagaggcagaacgtcgtgaaggatctgagcgtggaactggacagactgagcgaagagagcgtgaacaacgacatcagcagctggacaaagggcagatcaggcgaggctctgagcctgctgaagaagaggtttagccacagacctgtgcaagagaagttcgtgtgcctgaactgcggcttcgagacacacgccgatgaacaggctgccctgaacattgccagaagctggctgttcctgagaagccaagagtacaagaagtaccagaccaacaagaccaccggcaacaccgacaagagggcctttgtggaaacctggcagagcttctacagaaaaaagctgaaagaagtctggaagcccgccgtg

SEQ ID NO: 27159 - DNA, 2934 bp, Artificial Sequence
  CasX Variant
caagagatcaagagaatcaacaagatcagaaggagactggtcaaggacagcaacacaaagaaggccggcaagacaggccccatgaaaaccctgctcgtcagagtgatgacccctgacctgagagagcggctggaaaacctgagaaagaagcccgagaacatccctcagcctatcagcaacaccagcagggccaacctgaacaagctgctgaccgactacaccgagatgaagaaagccatcctgcacgtgtactgggaagagttccagaaagaccccgtgggcctgatgagcagagttgctcagcctgccagcaagaagatcgaccagaacaagctgaagcccgagatggacgagaagggcaatctgaccacagccggctttgcctgctctcagtgtggccagcctctgttcgtgtacaagctggaacaggtgtccgagaaaggcaaggcctacaccaactacttcggcagatgtaacgtggccgagcacgagaagctgattctgctggcccagctgaaacctgagaaggactctgatgaggccgtgacctacagcctgggcaagtttggacagagagccctggacttctacagcatccacgtgaccaaagaaagcacacaccccgtgaagcccctggctcagatcgccggcaatagatacgcctcttcccctgtgggcaaagccctgtccgatgcctgcatgggaacaatcgccagcttcctgagcaagtaccaggacatcatcatcgagcaccagaaggtggtcaagggcaaccagaagagactggaaagcctgagggagctggccggcaaagagaacctggaataccccagcgtgaccctgcctcctcagcctcacacaaaagaaggcgtggacgcctacaacgaagtgatcgccagagtgagaatgtgggtcaacctgaacctgtggcagaagctgaaactgtccagggacgacgccaagcctctgctgagactgaagggcttccctagcttccctctggtggaaagacaggccaatgaagtggattggtgggacatggtctgcaacgtgaagaagctgatcaacgagaagaaagaggatggcaaggttttctggcagaacctggccggctacaagagacaagaagccctgaggccttacctgagcagcgaagaggaccggaagaagggcaagaagttcgccagataccagctgggcgacctgctgctgcacctggaaaagaagcacggcgaggactggggcaaagtgtacgatgaggcctgggagagaatcgacaagaaggtggaaggcctgagcaagcacattaagctggaagaggaaagaaggagcgaggacgcccaatctaaagccgctctgaccgattggctgagagccaaggccagctttgtgatcgagggcctgaaagaggccgacaaggacgagttctgcagatgcgagctgaagctgcagaagtggtacggcgatctgagaggcaagcccttcgccattgaggccgagaacagcatcctggacatcagcggcttcagcaagcagtacaactgcgccttcatttggcagaaagacggcgtcaagaaactgaacctgtacctgatcatcaattacttcaaaggcggcaagctgcggttcaagaagatcaaacccgaggccttcgaggctaacagattctacaccgtgatcaacaaaaagtccggcgagatcgtgcccatggaagtgaacttcaacttcgacgaccccaacctgattatcctgcctctggccttcggcaagagacagggcagagagttcatctggaacgatctgctgagcctggaaaccggctctctgaagctggccaatggcagagtgatcgagaaaaccctgtacaacaggagaaccagacaggacgagcctgctctgtttgtggccctgaccttcgagagaagagaggtgctggacagcagcaacatcaagcccatgaacctgatcggcgtggaccggggcgagaatatccctgctgtgatcgccctgacagaccctgaaggatgcccactgagcagattcaaggactccctgggcaaccctacacacatcctgagaatcggcgagagctacaaagagaagcagaggacaatccaggccaagaaagaggtggaacagagaagagccggcggatactctaggaagtacgccagcaaggccaagaatctggccgacgacatggtccgaaacaccgccagagatctgctgtactacgccgtgacacaggacgccatgctgatcttcgagaatctgagcagaggcttcggccggcagggcaagagaacctttatggccgagaggcagtacaccagaatggaagattggctcacagctaaactggcctacgagggactgcccagcaagacctacctgtccaaaacactggcccagtatacctccaagacctgcagcaattgcggcttcaccatcaccagcgccgactacgacagagtgctggaaaagctcaagaaaaccgccaccggctggatgaccaccatcaacggcaaagagctgaaggttgagggccagatcacctactacaacaggtacaagaggcagaacgtcgtgaaggatctgagcgtggaactggacagactgagcgaagagagcgtgaacaacgacatcagcagctggacaaagggcagatcaggcgaggctctgagcctgctgaagaagaggtttagccacagacctgtgcaagagaagttcgtgtgcctgaactgcggcttcgagacacacgccgatgaacaggctgccctgaacattgccagaagctggctgttcctgagaagccaagagtacaagaagtaccagaccaacaagaccaccggcaacaccgacaagagggcctttgtggaaacctggcagagcttctacagaaaaaagctgaaagaagtctggaagcccgccgtg

SEQ ID NO: 27160 - DNA, 2934 bp, Artificial Sequence
  CasX Variant
caagagatcaagagaatcaacaagatcagaaggagactggtcaaggacagcaacacaaagaaggccggcaagacaggccccatgaaaaccctgctcgtcagagtgatgacccctgacctgagagagcggctggaaaacctgagaaagaagcccgagaacatccctcagcctatcagcaacaccagcagggccaacctgaacaagctgctgaccgactacaccgagatgaagaaagccatcctgcacgtgtactgggaagagttccagaaagaccccgtgggcctgatgagcagagttgctcagcctgccagcaagaagatcgaccagaacaagctgaagcccgagatggacgagaagggcaatctgaccacagccggctttgcctgctctcagtgtggccagcctctgttcgtgtacaagctggaacaggtgtccgagaaaggcaaggcctacaccaactacttcggcagatgtaacgtggccgagcacgagaagctgattctgctggcccagctgaaacctgagaaggactctgatgaggccgtgacctacagcctgggcaagtttggacagagagccctggacttctacagcatccacgtgaccaaagaaagcacacaccccgtgaagcccctggctcagatcgccggcaatagatacgcctctacccctgtgggcaaagccctgtccgatgcctgcatgggaacaatcgccagcttcctgagcaagtaccaggacatcatcatcgagcaccagaaggtggtcaagggcaaccagaagagactggaaagcctgagggagctggccggcaaagagaacctggaataccccagcgtgaccctgcctcctcagcctcacacaaaagaaggcgtggacgcctacaacgaagtgatcgccagagtgagaatgtgggtcaacctgaacctgtggcagaagctgaaactgtccagggacgacgccaagcctctgctgagactgaagggcttccctagcttccctctggtggaaagacaggccaatgaagtggattggtgggacatggtctgcaacgtgaagaagctgatcaacgagaagaaagaggatggcaaggttttctggcagaacctggccggctacaagagacaagaagccctgaggccttacctgagcagcgaagaggaccggaagaagggcaagaagttcgccagataccagctgggcgacctgctgctgcacctggaaaagaagcacggcgaggactggggcaaagtgtacgatgaggcctgggagagaatcgacaagaaggtggaaggcctgagcaagcacattaagctggaagaggaaagaaggagcgaggacgcccaatctaaagccgctctgaccgattggctgagagccaaggccagctttgtgatcgagggcctgaaagaggccgacaaggacgagttctgcagatgcgagctgaagctgcagaagtggtacggcgatctgagaggcaagcccttcgccattgaggccgagaacagcatcctggacatcagcggcttcagcaagcagtacaactgcgccttcatttggcagaaagacggcgtcaagaaactgaacctgtacctgatcatcaattacttcaaaggcggcaagctgcggttcaagaagatcaaacccgaggccttcgaggctaacagattctacaccgtgatcaacaaaaagtccggcgagatcgtgcccatggaagtgaacttcaacttcgacgaccccaacctgattatcctgcctctggccttcggcaagagacagggcagagagttcatctggaacgatctgctgagcctggaaaccggctctctgaagctggccaatggcagagtgatcgagaaaaccctgtacaacaggagaaccagacaggacgagcctgctctgtttgtggccctgaccttcgagagaagagaggtgctggacagcagcaacatcaagcccatgaacctgatcggcgtggaccggggcgagaatatccctgctgtgatcgccctgacagaccctgaaggatgcccactgagcagattcaaggactccctgggcaaccctacacacatcctgagaatcggcgagagctacaaagagaagcagaggacaatccaggccaagaaagaggtggaacagagaagagccggcggatactctaggaagtacgccagcaaggccaagaatctggccgacgacatggtccgaaacaccgccagagatctgctgtactacgccgtgacacaggacgccatgctgatcttcgagaatctgagcagaggcttcggccggcagggcaagagaacctttatggccgagaggcagtacaccagaatggaagattggctcacagctaaactggcctacgagggactgcccagcaagacctacctgtccaaaacactggcccagtatacctccaagacctgcagcaattgcggcttcaccatcaccagcgccgactacgacagagtgctggaaaagctcaagaaaaccgccaccggctggatgaccaccatcaacggcaaagagctgaaggttgagggccagatcacctactacaacaggtacaagaggcagaacgtcgtgaaggatctgagcgtggaactggacagactgagcgaagagagcgtgaacaacgacatcagcagctggacaaagggcagatcaggcgaggctctgagcctgctgaagaagaggtttagccacagacctgtgcaagagaagttcgtgtgcctgaactgcggcttcgagacacacgccgatgaacaggctgccctgaacattgccagaagctggctgttcctgagaagccaagagtacaagaagtaccagaccaacaagaccaccggcaacaccgacaagagggcctttgtggaaacctggcagagcttctacagaaaaaagctgaaagaagtctggaagcccgccgtg

SEQ ID NO: 27161 - DNA, 2934 bp, Artificial Sequence
  CasX Variant
caagagatcaagagaatcaacaagatcagaaggagactggtcaaggacagcaacacaaagaaggccggcaagacaggccccatgaaaaccctgctcgtcagagtgatgacccctgacctgagagagcggctggaaaacctgagaaagaagcccgagaacatccctcagcctatcagcaacaccagcagggccaacctgaacaagctgctgaccgactacaccgagatgaagaaagccatcctgcacgtgtactgggaagagttccagaaagaccccgtgggcctgatgagcagagttgctcagcctgccagcaagaagatcgaccagaacaagctgaagcccgagatggacgagaagggcaatctgaccacagccggctttgcctgctctcagtgtggccagcctctgttcgtgtacaagctggaacaggtgtccgagaaaggcaaggcctacaccaactacttcggcagatgtaacgtggccgagcacgagaagctgattctgctggcccagctgaaacctgagaaggactctgatgaggccgtgacctacagcctgggcaagtttggacagagagccctggacttctacagcatccacgtgaccaaagaaagcacacaccccgtgaagcccctggctcagatcgccggcaatagatacgcctctgcccctgtgggcaaagccctgtccgatgcctgcatgggaacaatcgccagcttcctgagcaagtaccaggacatcatcatcgagcaccagaaggtggtcaagggcaaccagaagagactggaaagcctgagggagctggccggcaaagagaacctggaataccccagcgtgaccctgcctcctcagcctcacacaaaagaaggcgtggacgcctacaacgaagtgatcgccagagtgagaatgtgggtcaacctgaacctgtggcagaagctgaaactgtccagggacgacgccaagcctctgctgagactgaagggcttccctagcttccctctggtggaaagacaggccaatgaagtggattggtgggacatggtctgcaacgtgaagaagctgatcaacgagaagaaagaggatggcaaggttttctggcagaacctggccggctacaagagacaagaagccctgaggccttacctgagcagcgaagaggaccggaagaagggcaagaagttcgccagataccagctgggcgacctgctgctgcacctggaaaagaagcacggcgaggactggggcaaagtgtacgatgaggcctgggagagaatcgacaagaaggtggaaggcctgagcaagcacattaagctggaagaggaaagaaggagcgaggacgcccaatctaaagccgctctgaccgattggctgagagccaaggccagctttgtgatcgagggcctgaaagaggccgacaaggacgagttctgcagatgcgagctgaagctgcagaagtggtacggcgatctgagaggcaagcccttcgccattgaggccgagaacagcatcctggacatcagcggcttcagcaagcagtacaactgcgccttcatttggcagaaagacggcgtcaagaaactgaacctgtacctgatcatcaattacttcaaaggcggcaagctgcggttcaagaagatcaaacccgaggccttcgaggctaacagattctacaccgtgatcaacaaaaagtccggcgagatcgtgcccatggaagtgaacttcaacttcgacgaccccaacctgattatcctgcctctggccttcggcaagagacagggcagagagttcatctggaacgatctgctgagcctggaaaccggctctctgaagctggccaatggcagagtgatcgagaaaaccctgtacaacaggagaaccagacaggacgagcctgctctgtttgtggccctgaccttcgagagaagagaggtgctggacagcagcaacatcaagcccatgaacctgatcggcgtggaccggggcgagaatatccctgctgtgatcgccctgacagaccctgaaggatgcccactgagcagattcaaggactccctgggcaaccctacacacatcctgagaatcggcgagagctacaaagagaagcagaggacaatccaggccaagaaagaggtggaacagagaagagccggcggatactctaggaagtacgccagcaaggccaagaatctggccgacgacatggtccgaaacaccgccagagatctgctgtactacgccgtgacacaggacgccatgctgatcttcgagaatctgagcagaggcttcggccggcagggcaagagaacctttatggccgagaggcagtacaccagaatggaagattggctcacagctaaactggcctacgagggactgcccagcaagacctacctgtccaaaacactggcccagtatacctccaagacctgcagcaattgcggcttcaccatcaccagcgccgactacgacagagtgctggaaaagctcaagaaaaccgccaccggctggatgaccaccatcaacggcaaagagctgaaggttgagggccagatcacctactacaacaggtacaagaggcagaacgtcgtgaaggatctgagcgtggaactggacagactgagcgaagagagcgtgaacaacgacatcagcagctggacaaagggcagatcaggcgaggctctgagcctgctgaagaagaggtttagccacagacctgtgcaagagaagttcgtgtgcctgaactgcggcttcgagacacacgccgatgaacaggctgccctgaacattgccagaagctggctgttcctgagaagccaagagtacaagaagtaccagaccaacaagaccaccggcaacaccgacaagagggcctttgtggaaacctggcagagcttctacagaaaaaagctgaaagaagtctggaagcccgccgtg

SEQ ID NO: 27162 - DNA, 2934 bp, Artificial Sequence
  CasX Variant
caagagatcaagagaatcaacaagatcagaaggagactggtcaaggacagcaacacaaagaaggccggcaagacaggccccatgaaaaccctgctcgtcagagtgatgacccctgacctgagagagcggctggaaaacctgagaaagaagcccgagaacatccctcagcctatcagcaacaccagcagggccaacctgaacaagctgctgaccgactacaccgagatgaagaaagccatcctgcacgtgtactgggaagagttccagaaagaccccgtgggcctgatgagcagagttgctcagcctgccagcaagaagatcgaccagaacaagctgaagcccgagatggacgagaagggcaatctgaccacagccggctttgcctgctctcagtgtggccagcctctgttcgtgtacaagctggaacaggtgtccgagaaaggcaaggcctacaccaactacttcggcagatgtaacgtggccgagcacgagaagctgattaagctggcccagctgaaacctgagaaggactctgatgaggccgtgacctacagcctgggcaagtttggacagagagccctggacttctacagcatccacgtgaccaaagaaagcacacaccccgtgaagcccctggctcagatcgccggcaatagatacgcctctggacctgtgggcaaagccctgtccgatgcctgcatgggaacaatcgccagcttcctgagcaagtaccaggacatcatcatcgagcaccagaaggtggtcaagggcaaccagaagagactggaaagcctgagggagctggccggcaaagagaacctggaataccccagcgtgaccctgcctcctcagcctcacacaaaagaaggcgtggacgcctacaacgaagtgatcgccagagtgagaatgtgggtcaacctgaacctgtggcagaagctgaaactgtccagggacgacgccaagcctctgctgagactgaagggcttccctagcttccctctggtggaaagacaggccaatgaagtggattggtgggacatggtctgcaacgtgaagaagctgatcaacgagaagaaagaggatggcaaggttttctggcagaacctggccggctacaagagacaagaagccctgaggccttacctgagcagcgaagaggaccggaagaagggcaagaagttcgccagataccagctgggcgacctgctgctgcacctggaaaagaagcacggcgaggactggggcaaagtgtacgatgaggcctgggagagaatcgacaagaaggtggaaggcctgagcaagcacattaagctggaagaggaaagaaggagcgaggacgcccaatctaaagccgctctgaccgattggctgagagccaaggccagctttgtgatcgagggcctgaaagaggccgacaaggacgagttctgcagatgcgagctgaagctgcagaagtggtacggcgatctgagaggcaagcccttcgccattgaggccgagaacagcatcctggacatcagcggcttcagcaagcagtacaactgcgccttcatttggcagaaagacggcgtcaagaaactgaacctgtacctgatcatcaattacttcaaaggcggcaagctgcggttcaagaagatcaaacccgaggccttcgaggctaacagattctacaccgtgatcaacaaaaagtccggcgagatcgtgcccatggaagtgaacttcaacttcgacgaccccaacctgattatcctgcctctggccttcggcaagagacagggcagagagttcatctggaacgatctgctgagcctggaaaccggctctctgaagctggccaatggcagagtgatcgagaaaaccctgtacaacaggagaaccagacaggacgagcctgctctgtttgtggccctgaccttcgagagaagagaggtgctggacagcagcaacatcaagcccatgaacctgatcggcgtggaccggggcgagaatatccctgctgtgatcgccctgacagaccctgaaggatgcccactgagcagattcaaggactccctgggcaaccctacacacatcctgagaatcggcgagagctacaaagagaagcagaggacaatccaggccaagaaagaggtggaacagagaagagccggcggatactctaggaagtacgccagcaaggccaagaatctggccgacgacatggtccgaaacaccgccagagatctgctgtactacgccgtgacacaggacgccatgctgatcttcgagaatctgagcagaggcttcggccggcagggcaagagaacctttatggccgagaggcagtacaccagaatggaagattggctcacagctaaactggcctacgagggactgcccagcaagacctacctgtccaaaacactggcccagtatacctccaagacctgcagcaattgcggcttcaccatcaccagcgccgactacgacagagtgctggaaaagctcaagaaaaccgccaccggctggatgaccaccatcaacggcaaagagctgaaggttgagggccagatcacctactacaacaggtacaagaggcagaacgtcgtgaaggatctgagcgtggaactggacagactgagcgaagagagcgtgaacaacgacatcagcagctggacaaagggcagatcaggcgaggctctgagcctgctgaagaagaggtttagccacagacctgtgcaagagaagttcgtgtgcctgaactgcggcttcgagacacacgccgatgaacaggctgccctgaacattgccagaagctggctgttcctgagaagccaagagtacaagaagtaccagaccaacaagaccaccggcaacaccgacaagagggcctttgtggaaacctggcagagcttctacagaaaaaagctgaaagaagtctggaagcccgccgtg

SEQ ID NO: 27163 - DNA, 2931 bp, Artificial Sequence
  CasX Variant
caagagatcaagagaatcaacaagatcagaaggagactggtcaaggacagcaacacaaagaaggccggcaagacaggccccatgaaaaccctgctcgtcagagtgatgacccctgacctgagagagcggctggaaaacctgagaaagaagcccgagaacatccctcagcctatcagcaacaccagcagggccaacctgaacaagctgctgaccgactacaccgagatgaagaaagccatcctgcacgtgtactgggaagagttccagaaagaccccgtgggcctgatgagcagagttgctcagcctgccagcaagaagatcgaccagaacaagctgaagcccgagatggacgagaagggcaatctgaccacagccggctttgcctgctctcagtgtggccagcctctgttcgtgtacaagctggaacaggtgtccgagaaaggcaaggcctacaccaactacttcggcagatgtaacgtggccgagcacgagaagctgattctgctggcccagctgaaacctgagaaggactctgatgaggccgtgacctacagcctgggcaagtttggacagagagccctggacttctacagcatccacgtgaccaaagaaagcacacaccccgtgaagcccctggctcagatcgccggcaatagatacgcctctggacctgtgggcaaagccctgtccgatgcctgcatgggaacaatcgccagcttcctgagcaagtaccaggacatcatcatcgagcaccagaaggtggtcaagggcaaccagaagagactggaaagcctgagggagctggccggcaaagagaacctggaataccccagcgtgaccctgcctcctcagcctcacacaaaagaaggcgtggacgcctacaacgaagtgatcgccagagtgagaatgtgggtcaacctgaacctgtggcagaagctgaaactgtccagggacgacgccaagcctctgctgagactgaagggcttccctagcttccctctggtggaaagacaggccaatgaagtggattggtgggacatggtctgcaacgtgaagaagctgatcaacgagaagaaagaggatggcaaggttttctggcagaacctggccggctacaagagacaagaagccctgaggccttacctgagcagccccgaggaccggaagaagggcaagaagttcgccagataccagttcggcgacctgctgctgcacctggaaaagaagcacggcgaggactggggcaaagtgtacgatgaggcctgggagagaatcgacaagaaggtggaaggcctgagcaagcacattaagctggaagaggaaagaaggagcgaggacgcccaatctaaagccgctctgaccgattggctgagagccaaggccagctttgtgatcgagggcctgaaagaggccgacaaggacgagttctgcagatgcgagctgaagctgcagaagtggtacggcgatctgagaggcaagcccttcgccattgaggccgagaacagcatcctggacatcagcggcttcagcaagcagtacaactgcgccttcatttggcagaaagacggcgtcaagaaactgaacctgtacctgatcatcaattacttcaaaggcggcaagctgcggttcaagaagatcaaacccgaggccttcgaggctaacagattctacaccgtgatcaacaaaaagtccggcgagatcgtgcccatggaagtgaacttcaacttcgacgaccccaacctgattatcctgcctctggccttcggcaagagacagggcagagagttcatctggaacgatctgctgagcctggaaaccggctctctgaagctggccaatggcagagtgatcgagaaaaccctgtacaacaggagaaccagacaggacgagcctgctctgtttgtggccctgaccttcgagagaagagaggtgctggacagcagcaacatcaagcccatgaacctgatcggcgtggaccggggcgagaatatccctgctgtgatcgccctgacagaccctgaaggatgcccactgagcagattcaaggactccctgggcaaccctacacacatcctgagaatcggcgagagctacaaagagaagcagaggacaatccaggccaagaaagaggtggaacagagaagagccggcggatactctaggaagtacgccagcaaggccaagaatctggccaacgacatggtccgaaacaccgccagagatctgctgtactacgccgtgacacaggacgccatgctgatcttcgagaatctgagcagaggcttcggccggcagggcaagagaacctttatggccgagaggcagtacaccagaatggaagattggctcacagctaaactggcctacgagggactgagcaagacctacctgtccaaaacactggcccagtatacctccaagacctgcagcaattgcggcttcaccatcaccagcgccgactacgacagagtgctggaaaagctcaagaaaaccgccaccggctggatgaccaccatcaacggcaaagagctgaaggttgagggccagatcacctactacaacaggaggaagaggcagaacgtcgtgaaggatctgagcgtggaactggacagactgagcgaagagagcgtgaacaacgacatcagcagctggacaaagggcagatcaggcgaggctctgagcctgctgaagaagaggtttagccacagacctgtgcaagagaagttcgtgtgcctgaactgcggcttcgagacacacgccgatgaacaggctgccctgaacattgccagaagctggctgttcctgagaagccaagagtacaagaagtaccagaccaacaagaccaccggcaacaccgacaagagggcctttgtggaaacctggcagagcttctacagaaaaaagctgaaagaagtctggaagcccgccgtg

SEQ ID NO: 27164 - DNA, 2931 bp, Artificial Sequence
  CasX Variant
caagagatcaagagaatcaacaagatcagaaggagactggtcaaggacagcaacacaaagaaggccggcaagacaggccccatgaaaaccctgctcgtcagagtgatgacccctgacctgagagagcggctggaaaacctgagaaagaagcccgagaacatccctcagcctatcagcaacaccagcagggccaacctgaacaagctgctgaccgactacaccgagatgaagaaagccatcctgcacgtgtactgggaagagttccagaaagaccccgtgggcctgatgagcagagttgctcagcctgccagcaagaagatcgaccagaacaagctgaagcccgagatggacgagaagggcaatctgaccacagccggctttgcctgctctcagtgtggccagcctctgttcgtgtacaagctggaacaggtgtccgagaaaggcaaggcctacaccaactacttcggcagatgtaacgtggccgagcacgagaagctgattctgctggcccagctgaaacctgagaaggactctgatgaggccgtgacctacagcctgggcaagtttggacagagagccctggacttctacagcatccacgtgaccaaagaaagcacacaccccgtgaagcccctggctcagatcgccggcaatagatacgcctctggacctgtgggcaaagccctgtccgatgcctgcatgggaacaatcgccagcttcctgagcaagtaccaggacatcatcatcgagcaccagaaggtggtcaagggcaaccagaagagactggaaagcctgagggagctggccggcaaagagaacctggaataccccagcgtgaccctgcctcctcagcctcacacaaaagaaggcgtggacgcctacaacgaagtgatcgccagagtgagaatgtgggtcaacctgaacctgtggcagaagctgaaactgtccagggacgacgccaagcctctgctgagactgaagggcttccctagcttccctctggtggaaagacaggccaatgaagtggattggtgggacatggtctgcaacgtgaagaagctgatcaacgagaagaaagaggatggcaaggttttctggcagaacctggccggctacaagagacaagaagccctgaggccttacctgagcagcgaagaggaccggaagaagggcaagaagttcgccagataccagctgggcgacctgctgctgcacctggaaaagaagcacggcgaggactggggcaaagtgtacgatgaggcctgggagagaatcgacaagaaggtggaaggcctgagcaagcacattaagctggaagaggaaagaaggagcgaggacgcccaatctaaagccgctctgaccgattggctgagagccaaggccagctttgtgatcgagggcctgaaagaggccgacaaggacgagttcagcagatgcgagctgaagctgcagaagtggtacggcgatctgagaggcaagcccttcgccattgaggccgagaacagcatcctggacatcagcggcttcagcaagcagtacaactgcgccttcatttggcagaaagacggcgtcaagaaactgaacctgtacctgatcatcaattacttcaaaggcggcaagctgcggttcaagaagatcaaacccgaggccttcgaggctaacagattctacaccgtgatcaacaaaaagtccggcgagatcgtgcccatggaagtgaacttcaacttcgacgaccccaacctgattatcctgcctctggccttcggcaagagacagggcagagagttcatctggaacgatctgctgagcctggaaaccggctctctgaagctggccaatggcagagtgatcgagaaaaccctgtacaacaggagaaccagacaggacgagcctgctctgtttgtggccctgaccttcgagagaagagaggtgctggacagcagcaacatcaagcccatgaacctgatcggcgtggaccggggcgagaatatccctgctgtgatcgccctgacagaccctgaaggatgcccactgagcagattcaaggactccctgggcaaccctacacacatcctgagaatcggcgagagctacaaagagaagcagaggacaatccaggccaagaaagaggtggaacagagaagagccggcggatactctaggaagtacgccagcaaggccaagaatctggccgacgacatggtccgaaacaccgccagagatctgctgtactacgccgtgacacaggacgccatgctgatcttcgagaatctgagcagaggcttcggccggcagggcaagagaacctttatggccgagaggcagtacaccagaatggaagattggctcacagctaaactggcctacgagggactgagcaagacctacctgtccaaaacactggcccagtatacctccaagacctgcagcaattgcggcttcaccatcaccagcgccgactacgacagagtgctggaaaagctcaagaaaaccgccaccggctggatgaccaccatcaacggcaaagagctgaaggttgagggccagatcacctactacaacaggaggaagaggcagaacgtcgtgaaggatctgagcgtggaactggacagactgagcgaagagagcgtgaacaacgacatcagcagctggacaaagggcagatcaggcgaggctctgagcctgctgaagaagaggtttagccacagacctgtgcaagagaagttcgtgtgcctgaactgcggcttcgagacacacgccgatgaacaggctgccctgaacattgccagaagctggctgttcctgagaagccaagagtacaagaagtaccagaccaacaagaccaccggcaacaccgacaagagggcctttgtggaaacctggcagagcttctacagaaaaaagctgaaagaagtctggaagcccgccgtg

SEQ ID NO: 27165 - DNA, 2931 bp, Artificial Sequence
  CasX Variant
caagagatcaagagaatcaacaagatcagaaggagactggtcaaggacagcaacacaaagaaggccggcaagacaggccccatgaaaaccctgctcgtcagagtgatgacccctgacctgagagagcggctggaaaacctgagaaagaagcccgagaacatccctcagcctatcagcaacaccagcagggccaacctgaacaagctgctgaccgactacaccgagatgaagaaagccatcctgcacgtgtactgggaagagttccagaaagaccccgtgggcctgatgagcagagttgctcagcctgccagcaagaagatcgaccagaacaagctgaagcccgagatggacgagaagggcaatctgaccacagccggctttgcctgctctcagtgtggccagcctctgttcgtgtacaagctggaacaggtgtccgagaaaggcaaggcctacaccaactacttcggcagatgtaacgtggccgagcacgagaagctgattctgctggcccagctgaaacctgagaaggactctgatgaggccgtgacctacagcctgggcaagtttggacagagagccctggacttctacagcatccacgtgaccaaagaaagcacacaccccgtgaagcccctggctcagatcgccggcaatagatacgcctctggacctgtgggcaaagccctgtccgatgcctgcatgggaacaatcgccagcttcctgagcaagtaccaggacatcatcatcgagcaccagaaggtggtcaagggcaaccagaagagactggaaagcctgagggagctggccggcaaagagaacctggaataccccagcgtgaccctgcctcctcagcctcacacaaaagaaggcgtggacgcctacaacgaagtgatcgccagagtgagaatgtgggtcaacctgaacctgtggcagaagctgaaactgtccagggacgacgccaagcctctgctgagactgaagggcttccctagcttccctctggtggaaagacaggccaatgaagtggattggtgggacatggtctgcaacgtgaagaagctgatcaacgagaagaaagaggatggcaaggttttctggcagaacctggccggctacaagagacaagaagccctgaggccttacctgagcagcgaaaacgaccggaagaagggcaagaagttcgccagataccagttcggcgacctgctgaagcacctggaaaagaagcacggcgaggactggggcaaagtgtacgatgaggcctgggagagaatcgacaagaaggtggaaggcctgagcaagcacattaagctggaagaggaaagaaggagcgaggacgcccaatctaaagccgctctgaccgattggctgagagccaaggccagctttgtgatcgagggcctgaaagaggccgacaaggacgagttcagcagatgcgagctgaagctgcagaagtggtacggcgatctgagaggcaagcccttcgccattgaggccgagaacagcatcctggacatcagcggcttcagcaagcagtacaactgcgccttcatttggcagaaagacggcgtcaagaaactgaacctgtacctgatcatcaattacttcaaaggcggcaagctgcggttcaagaagatcaaacccgaggccttcgaggctaacagattctacaccgtgatcaacaaaaagtccggcgagatcgtgcccatggaagtgaacttcaacttcgacgaccccaacctgattatcctgcctctggccttcggcaagagacagggcagagagttcatctggaacgatctgctgagcctggaaaccggctctctgaagctggccaatggcagagtgatcgagaaaaccctgtacaacaggagaaccagacaggacgagcctgctctgtttgtggccctgaccttcgagagaagagaggtgctggacagcagcaacatcaagcccatgaacctgatcggcgtggaccggggcgagaatatccctgctgtgatcgccctgacagaccctgaaggatgcccactgagcagattcaaggactccctgggcaaccctacacacatcctgagaatcggcgagagctacaaagagaagcagaggacaatccaggccaagaaagaggtggaacagagaagagccggcggatactctaggaagtacgccagcaaggccaagaatctggccgacgacatggtccgaaacaccgccagagatctgctgtactacgccgtgacacaggacgccatgctgatcttcgagaatctgagcagaggcttcggccggcagggcaagagaacctttatggccgagaggcagtacaccagaatggaagattggctcacagctaaactggcctacgagggactgagcaagaccctgctgtccaaaacactggcccagtatacctccaagacctgcagcaattgcggcttcaccatcaccagcgccgactacgacagagtgctggaaaagctcaagaaaaccgccaccggctggatgaccaccatcaacggcaaagagctgaaggttgagggccagatcacctactacaacaggaggaagaggcagaacgtcgtgaaggatctgagcgtggaactggacagactgagcgaagagagcgtgaacaacgacatcagcagctggacaaagggcagatcaggcgaggctctgagcctgctgaagaagaggtttagccacagacctgtgcaagagaagttcgtgtgcctgaactgcggcttcgagacacacgccgatgaacaggctgccctgaacattgccagaagctggctgttcctgagaagccaagagtacaagaagtaccagaccaacaagaccaccggcaacaccgacaagagggcctttgtggaaacctggcagagcttctacagaaaaaagctgaaagaagtctggaagcccgccgtg

SEQ ID NO: 27166 - DNA, 2931 bp, Artificial Sequence
  CasX Variant
caagagatcaagagaatcaacaagatcagaaggagactggtcaaggacagcaacacaaagaaggccggcaagacaggccccatgaaaaccctgctcgtcagagtgatgacccctgacctgagagagcggctggaaaacctgagaaagaagcccgagaacatccctcagcctatcagcaacaccagcagggccaacctgaacaagctgctgaccgactacaccgagatgaagaaagccatcctgcacgtgtactgggaagagttccagaaagaccccgtgggcctgatgagcagagttgctcagcctgccagcaagaagatcgaccagaacaagctgaagcccgagatggacgagaagggcaatctgaccacagccggctttgcctgctctcagtgtggccagcctctgttcgtgtacaagctggaacaggtgtccgagaaaggcaaggcctacaccaactacttcggcagatgtaacgtggccgagcacgagaagctgattctgctggcccagctgaaacctgagaaggactctgatgaggccgtgacctacagcctgggcaagtttggacagagagccctggacttctacagcatccacgtgaccaaagaaagcacacaccccgtgaagcccctggctcagatcgccggcaatagatacgcctctggacctgtgggcaaagccctgtccgatgcctgcatgggaacaatcgccagcttcctgagcaagtaccaggacatcatcatcgagcaccagaaggtggtcaagggcaaccagaagagactggaaagcctgagggagctggccggcaaagagaacctggaataccccagcgtgaccctgcctcctcagcctcacacaaaagaaggcgtggacgcctacaacgaagtgatcgccagagtgagaatgtgggtcaacctgaacctgtggcagaagctgaaactgtccagggacgacgccaagcctctgctgagactgaagggcttccctagcttccctctggtggaaagacaggccaatgaagtggattggtgggacatggtctgcaacgtgaagaagctgatcaacgagaagaaagaggatggcaaggttttctggcagaacctggccggctacaagagacaagaagccctgaggccttacctgagcagccccgaggaccggaagaagggcaagaagttcgccagataccagctgggcgacctgctgctgcacctggaaaagaagcacggcgaggactggggcaaagtgtacgatgaggcctgggagagaatcgacaagaaggtggaaggcctgagcaagcacattaagctggaagaggaaagaaggagcgaggacgcccaatctaaagccgctctgaccgattggctgagagccaaggccagctttgtgatcgagggcctgaaagaggccgacaaggacgagttctgcagatgcgagctgaagctgcagaagtggtacggcgatctgagaggcaagcccttcgccattgaggccgagaacagcatcctggacatcagcggcttcagcaagcagtacaactgcgccttcatttggcagaaagacggcgtcaagaaactgaacctgtacctgatcatcaattacttcaaaggcggcaagctgcggttcaagaagatcaaacccgaggccttcgaggctaacagattctacaccgtgatcaacaaaaagtccggcgagatcgtgcccatggaagtgaacttcaacttcgacgaccccaacctgattatcctgcctctggccttcggcaagagacagggcagagagttcatctggaacgatctgctgagcctggaaaccggctctctgaagctggccaatggcagagtgatcgagaaaaccctgtacaacaggagaaccagacaggacgagcctgctctgtttgtggccctgaccttcgagagaagagaggtgctggacagcagcaacatcaagcccatgaacctgatcggcgtggaccggggcgagaatatccctgctgtgatcgccctgacagaccctgaaggatgcccactgagcagattcaaggactccctgggcaaccctacacacatcctgagaatcggcgagagctacaaagagaagcagaggacaatccaggccaagaaagaggtggaacagagaagagccggcggatactctaggaagtacgccagcaaggccaagaatctggccaacgacatggtccgaaacaccgccagagatctgctgtactacgccgtgacacaggacgccatgctgatcttcgagaatctgagcagaggcttcggccggcagggcaagagaacctttatggccgagaggcagtacaccagaatggaagattggctcacagctaaactggcctacgagggactgagcaagacctacctgtccaaaacactggcccagtatacctccaagacctgcagcaattgcggcttcaccatcaccagcgccgactacgacagagtgctggaaaagctcaagaaaaccgccaccggctggatgaccaccatcaacggcaaagagctgaaggttgagggccagatcacctactacaacaggaggaagaggcagaacgtcgtgaaggatctgagcgtggaactggacagactgagcgaagagagcgtgaacaacgacatcagcagctggacaaagggcagatcaggcgaggctctgagcctgctgaagaagaggtttagccacagacctgtgcaagagaagttcgtgtgcctgaactgcggcttcgagacacacgccgatgaacaggctgccctgaacattgccagaagctggctgttcctgagaagccaagagtacaagaagtaccagaccaacaagaccaccggcaacaccgacaagagggcctttgtggaaacctggcagagcttctacagaaaaaagctgaaagaagtctggaagcccgccgtg

SEQ ID NO: 27167 - DNA, 2931 bp, Artificial Sequence
  CasX Variant
caagagatcaagagaatcaacaagatcagaaggagactggtcaaggacagcaacacaaagaaggccggcaagacaggccccatgaaaaccctgctcgtcagagtgatgacccctgacctgagagagcggctggaaaacctgagaaagaagcccgagaacatccctcagcctatcagcaacaccagcagggccaacctgaacaagctgctgaccgactacaccgagatgaagaaagccatcctgcacgtgtactgggaagagttccagaaagaccccgtgggcctgatgagcagagttgctcagcctgccagcaagaagatcgaccagaacaagctgaagcccgagatggacgagaagggcaatctgaccacagccggctttgcctgctctcagtgtggccagcctctgttcgtgtacaagctggaacaggtgtccgagaaaggcaaggcctacaccaactacttcggcagatgtaacgtggccgagcacgagaagctgattctgctggcccagctgaaacctgagaaggactctgatgaggccgtgacctacagcctgggcaagtttggacagagagccctggacttctacagcatccacgtgaccaaagaaagcacacaccccgtgaagcccctggctcagatcgccggcaatagatacgcctctggacctgtgggcaaagccctgtccgatgcctgcatgggaacaatcgccagcttcctgagcaagtaccaggacatcatcatcgagcaccagaaggtggtcaagggcaaccagaagagactggaaagcctgagggagctggccggcaaagagaacctggaataccccagcgtgaccctgcctcctcagcctcacacaaaagaaggcgtggacgcctacaacgaagtgatcgccagagtgagaatgtgggtcaacctgaacctgtggcagaagctgaaactgtccagggacgacgccaagcctctgctgagactgaagggcttccctagcttccctctggtggaaagacaggccaatgaagtggattggtgggacatggtctgcaacgtgaagaagctgatcaacgagaagaaagaggatggcaaggttttctggcagaacctggccggctacaagagacaagaagccctgaggccttacctgagcagccccgaggaccggaagaagggcaagaagttcgccagataccagctgggcgacctgctgctgcacctggaaaagaagcacggcgaggactggggcaaagtgtacgatgaggcctgggagagaatcgacaagaaggtggaaggcctgagcaagcacattaagctggaagaggaaagaaggagcgaggacgcccaatctaaagccgctctgaccgattggctgagagccaaggccagctttgtgatcgagggcctgaaagaggccgacaaggacgagttctgcagatgcgagctgaagctgcagaagtggtacggcgatctgagaggcaagcccttcgccattgaggccgagaacagcatcctggacatcagcggcttcagcaagcagtacaactgcgccttcatttggcagaaagacggcgtcaagaaactgaacctgtacctgatcatcaattacttcaaaggcggcaagctgcggttcaagaagatcaaacccgaggccttcgaggctaacagattctacaccgtgatcaacaaaaagtccggcgagatcgtgcccatggaagtgaacttcaacttcgacgaccccaacctgattatcctgcctctggccttcggcaagagacagggcagagagttcatctggaacgatctgctgagcctggaaaccggctctctgaagctggccaatggcagagtgatcgagaaacccctgtacaacaggagaaccagacaggacgagcctgctctgtttgtggccctgaccttcgagagaagagaggtgctggacagcagcaacatcaagcccatgaacctgatcggcgtggaccggggcgagaatatccctgctgtgatcgccctgacagaccctgaaggatgcccactgagcagattcaaggactccctgggcaaccctacacacatcctgagaatcggcgagagctacaaagagaagcagaggacaatccaggccaagaaagaggtggaacagagaagagccggcggatactctaggaagtacgccagcaaggccaagaatctggccgacgacatggtccgaaacaccgccagagatctgctgtactacgccgtgacacaggacgccatgctgatcttcgagaatctgagcagaggcttcggccggcagggcaagagaacctttatggccgagaggcagtacaccagaatggaagattggctcacagctaaactggcctacgagggactgagcaagacctacctgtccaaaacactggcccagtatacctccaagacctgcagcaattgcggcttcaccatcaccagcgccgactacgacagagtgctggaaaagctcaagaaaaccgccaccggctggatgaccaccatcaacggcaaagagctgaaggttgagggccagatcacctactacaacaggaggaagaggcagaacgtcgtgaaggatctgagcgtggaactggacagactgagcgaagagagcgtgaacaacgacatcagcagctggacaaagggcagatcaggcgaggctctgagcctgctgaagaagaggtttagccacagacctgtgcaagagaagttcgtgtgcctgaactgcggcttcgagacacacgccgatgaacaggctgccctgaacattgccagaagctggctgttcctgagaagccaagagtacaagaagtaccagaccaacaagaccaccggcaacaccgacaagagggcctttgtggaaacctggcagagcttctacagaaaaaagctgaaagaagtctggaagcccgccgtg

SEQ ID NO: 27168 - DNA, 2937 bp, Artificial Sequence
  CasX Variant
caagagatcaagagaatcaacaagatcagaaggagactggtcaaggacagcaacacaaagaaggccggcaagacacggggccccatgaaaaccctgctcgtcagagtgatgacccctgacctgagagagcggctggaaaacctgagaaagaagcccgagaacatccctcagcctatcagcaacaccagcagggccaacctgaacaagctgctgaccgactacaccgagatgaagaaagccatcctgcacgtgtactgggaagagttccagaaagaccccgtgggcctgatgagcagagttgctcagcctgccagcaagaagatcgaccagaacaagctgaagcccgagatggacgagaagggcaatctgaccacagccggctttgcctgctctcagtgtggccagcctctgttcgtgtacaagctggaacaggtgtccgagaaaggcaaggcctacaccaactacttcggcagatgtaacgtggccgagcacgagaagctgattctgctggcccagctgaaacctgagaaggactctgatgaggccgtgacctacagcctgggcaagtttggacagagagccctggacttctacagcatccacgtgaccaaagaaagcacacaccccgtgaagcccctggctcagatcgccggcaatagatacgcctcttcccctgtgggcaaagccctgtccgatgcctgcatgggaacaatcgccagcttcctgagcaagtaccaggacatcatcatcgagcaccagaaggtggtcaagggcaaccagaagagactggaaagcctgagggagctggccggcaaagagaacctggaataccccagcgtgaccctgcctcctcagcctcacacaaaagaaggcgtggacgcctacaacgaagtgatcgccagagtgagaatgtgggtcaacctgaacctgtggcagaagctgaaactgtccagggacgacgccaagcctctgctgagactgaagggcttccctagcttccctctggtggaaagacaggccaatgaagtggattggtgggacatggtctgcaacgtgaagaagctgatcaacgagaagaaagaggatggcaaggttttctggcagaacctggccggctacaagagacaagaagccctgaggccttacctgagcagcgaagaggaccggaagaagggcaagaagttcgccagataccagctgggcgacctgctgctgcacctggaaaagaagcacggcgaggactggggcaaagtgtacgatgaggcctgggagagaatcgacaagaaggtggaaggcctgagcaagcacattaagctggaagaggaaagaaggagcgaggacgcccaatctaaagccgctctgaccgattggctgagagccaaggccagctttgtgatcgagggcctgaaagaggccgacaaggacgagttctgcagatgcgagctgaagctgcagaagtggtacggcgatctgagaggcaagcccttcgccattgaggccgagaacagcatcctggacatcagcggcttcagcaagcagtacaactgcgccttcatttggcagaaagacggcgtcaagaaactgaacctgtacctgatcatcaattacttcaaaggcggcaagctgcggttcaagaagatcaaacccgaggccttcgaggctaacagattctacaccgtgatcaacaaaaagtccggcgagatcgtgcccatggaagtgaacttcaacttcgacgaccccaacctgattatcctgcctctggccttcggcaagagacagggcagagagttcatctggaacgatctgctgagcctggaaaccggctctctgaagctggccaatggcagagtgatcgagaaaaccctgtacaacaggagaaccagacaggacgagcctgctctgtttgtggccctgaccttcgagagaagagaggtgctggacagcagcaacatcaagcccatgaacctgatcggcgtggaccggggcgagaatatccctgctgtgatcgccctgacagaccctgaaggatgcccactgagcagattcaaggactccctgggcaaccctacacacatcctgagaatcggcgagagctacaaagagaagcagaggacaatccaggccaagaaagaggtggaacagagaagagccggcggatactctaggaagtacgccagcaaggccaagaatctggccgacgacatggtccgaaacaccgccagagatctgctgtactacgccgtgacacaggacgccatgctgatcttcgagaatctgagcagaggcttcggccggcagggcaagagaacctttatggccgagaggcagtacaccagaatggaagattggctcacagctaaactggcctacgagggactgcccagcaagacctacctgtccaaaacactggcccagtatacctccaagacctgcagcaattgcggcttcaccatcaccagcgccgactacgacagagtgctggaaaagctcaagaaaaccgccaccggctggatgaccaccatcaacggcaaagagctgaaggttgagggccagatcacctactacaacaggtacaagaggcagaacgtcgtgaaggatctgagcgtggaactggacagactgagcgaagagagcgtgaacaacgacatcagcagctggacaaagggcagatcaggcgaggctctgagcctgctgaagaagaggtttagccacagacctgtgcaagagaagttcgtgtgcctgaactgcggcttcgagacacacgccgatgaacaggctgccctgaacattgccagaagctggctgttcctgagaagccaagagtacaagaagtaccagaccaacaagaccaccggcaacaccgacaagagggcctttgtggaaacctggcagagcttctacagaaaaaagctgaaagaagtctggaagcccgccgtg

SEQ ID NO: 27169 - DNA, 2937 bp, Artificial Sequence
  CasX Variant
caagagatcaagagaatcaacaagatcagaaggagactggtcaaggacagcaacacaaagaaggccggcaagacacggggccccatgaaaaccctgctcgtcagagtgatgacccctgacctgagagagcggctggaaaacctgagaaagaagcccgagaacatccctcagcctatcagcaacaccagcagggccaacctgaacaagctgctgaccgactacaccgagatgaagaaagccatcctgcacgtgtactgggaagagttccagaaagaccccgtgggcctgatgagcagagttgctcagcctgccagcaagaagatcgaccagaacaagctgaagcccgagatggacgagaagggcaatctgaccacagccggctttgcctgctctcagtgtggccagcctctgttcgtgtacaagctggaacaggtgtccgagaaaggcaaggcctacaccaactacttcggcagatgtaacgtggccgagcacgagaagctgattctgctggcccagctgaaacctgagaaggactctgatgaggccgtgacctacagcctgggcaagtttggacagagagccctggacttctacagcatccacgtgaccaaagaaagcacacaccccgtgaagcccctggctcagatcgccggcaatagatacgcctcttcccctgtgggcaaagccctgtccggcgcctgcatgggaacaatcgccagcttcctgagcaagtaccaggacatcatcatcgagcaccagaaggtggtcaagggcaaccagaagagactggaaagcctgagggagctggccggcaaagagaacctggaataccccagcgtgaccctgcctcctcagcctcacacaaaagaaggcgtggacgcctacaacgaagtgatcgccagagtgagaatgtgggtcaacctgaacctgtggcagaagctgaaactgtccagggacgacgccaagcctctgctgagactgaagggcttccctagcttccctctggtggaaagacaggccaatgaagtggattggtgggacatggtctgcaacgtgaagaagctgatcaacgagaagaaagaggatggcaaggttttctggcagaacctggccggctacaagagacaagaagccctgaggccttacctgagcagcgaagaggaccggaagaagggcaagaagttcgccagataccagctgggcgacctgctgctgcacctggaaaagaagcacggcgaggactggggcaaagtgtacgatgaggcctgggagagaatcgacaagaaggtggaaggcctgagcaagcacattaagctggaagaggaaagaaggagcgaggacgcccaatctaaagccgctctgaccgattggctgagagccaaggccagctttgtgatcgagggcctgaaagaggccgacaaggacgagttctgcagatgcgagctgaagctgcagaagtggtacggcgatctgagaggcaagcccttcgccattgaggccgagaacagcatcctggacatcagcggcttcagcaagcagtacaactgcgccttcatttggcagaaagacggcgtcaagaaactgaacctgtacctgatcatcaattacttcaaaggcggcaagctgcggttcaagaagatcaaacccgaggccttcgaggctaacagattctacaccgtgatcaacaaaaagtccggcgagatcgtgcccatggaagtgaacttcaacttcgacgaccccaacctgattatcctgcctctggccttcggcaagagacagggcagagagttcatctggaacgatctgctgagcctggaaaccggctctctgaagctggccaatggcagagtgatcgagaaaaccctgtacaacaggagaaccagacaggacgagcctgctctgtttgtggccctgaccttcgagagaagagaggtgctggacagcagcaacatcaagcccatgaacctgatcggcgtggaccggggcgagaatatccctgctgtgatcgccctgacagaccctgaaggatgcccactgagcagattcaaggactccctgggcaaccctacacacatcctgagaatcggcgagagctacaaagagaagcagaggacaatccaggccaagaaagaggtggaacagagaagagccggcggatactctaggaagtacgccagcaaggccaagaatctggccgacgacatggtccgaaacaccgccagagatctgctgtactacgccgtgacacaggacgccatgctgatcttcgagaatctgagcagaggcttcggccggcagggcaagagaacctttatggccgagaggcagtacaccagaatggaagattggctcacagctaaactggcctacgagggactgcccagcaagacctacctgtccaaaacactggcccagtatacctccaagacctgcagcaattgcggcttcaccatcaccagcgccgactacgacagagtgctggaaaagctcaagaaaaccgccaccggctggatgaccaccatcaacggcaaagagctgaaggttgagggccagatcacctactacaacaggtacaagaggcagaacgtcgtgaaggatctgagcgtggaactggacagactgagcgaagagagcgtgaacaacgacatcagcagctggacaaagggcagatcaggcgaggctctgagcctgctgaagaagaggtttagccacagacctgtgcaagagaagttcgtgtgcctgaactgcggcttcgagacacacgccgatgaacaggctgccctgaacattgccagaagctggctgttcctgagaagccaagagtacaagaagtaccagaccaacaagaccaccggcaacaccgacaagagggcctttgtggaaacctggcagagcttctacagaaaaaagctgaaagaagtctggaagcccgccgtg

SEQ ID NO: 27170 - DNA, 2934 bp, Artificial Sequence
  CasX Variant
caagagatcaagagaatcaacaagatcagaaggagactggtcaaggacagcaacacaaagaaggccggcaagacaggccccatgaaaaccctgctcgtcagagtgatgacccctgacctgagagagcggctggaaaacctgagaaagaagcccgagaacatccctcagcctatcagcaacaccagcagggccaacctgaacaagctgctgaccgactacaccgagatgaagaaagccatcctgcacgtgtactgggaagagttccagaaagaccccgtgggcctgatgagcagagttgctcagcctgccagcaagaagatcgaccagaacaagctgaagcccgagatggacgagaagggcaatctgaccacagccggctttgcctgctctcagtgtggccagcctctgttcgtgtacaagctggaacaggtgtccgagaaaggcaaggcctacaccaactacttcggcagatgtaacgtggccgagcacgagaagctgattaagctggcccagctgaaacctgagaaggactctgatgaggccgtgacctacagcctgggcaagtttggacagagagccctggacttctacagcatccacgtgaccaaagaaagcacacaccccgtgaagcccctggctcagatcgccggcaatagatacgcctcttcccctgtgggcaaagccctgtccgatgcctgcatgggaacaatcgccagcttcctgagcaagtaccaggacatcatcatcgagcaccagaaggtggtcaagggcaaccagaagagactggaaagcctgagggagctggccggcaaagagaacctggaataccccagcgtgaccctgcctcctcagcctcacacaaaagaaggcgtggacgcctacaacgaagtgatcgccagagtgagaatgtgggtcaacctgaacctgtggcagaagctgaaactgtccagggacgacgccaagcctctgctgagactgaagggcttccctagcttccctctggtggaaagacaggccaatgaagtggattggtgggacatggtctgcaacgtgaagaagctgatcaacgagaagaaagaggatggcaaggttttctggcagaacctggccggctacaagagacaagaagccctgaggccttacctgagcagcgaagaggaccggaagaagggcaagaagttcgccagataccagctgggcgacctgctgctgcacctggaaaagaagcacggcgaggactggggcaaagtgtacgatgaggcctgggagagaatcgacaagaaggtggaaggcctgagcaagcacattaagctggaagaggaaagaaggagcgaggacgcccaatctaaagccgctctgaccgattggctgagagccaaggccagctttgtgatcgagggcctgaaagaggccgacaaggacgagttctgcagatgcgagctgaagctgcagaagtggtacggcgatctgagaggcaagcccttcgccattgaggccgagaacagcatcctggacatcagcggcttcagcaagcagtacaactgcgccttcatttggcagaaagacggcgtcaagaaactgaacctgtacctgatcatcaattacttcaaaggcggcaagctgcggttcaagaagatcaaacccgaggccttcgaggctaacagattctacaccgtgatcaacaaaaagtccggcgagatcgtgcccatggaagtgaacttcaacttcgacgaccccaacctgattatcctgcctctggccttcggcaagagacagggcagagagttcatctggaacgatctgctgagcctggaaaccggctctctgaagctggccaatggcagagtgatcgagaaaaccctgtacaacaggagaaccagacaggacgagcctgctctgtttgtggccctgaccttcgagagaagagaggtgctggacagcagcaacatcaagcccatgaacctgatcggcgtggaccggggcgagaatatccctgctgtgatcgccctgacagaccctgaaggatgcccactgagcagattcaaggactccctgggcaaccctacacacatcctgagaatcggcgagagctacaaagagaagcagaggacaatccaggccaagaaagaggtggaacagagaagagccggcggatactctaggaagtacgccagcaaggccaagaatctggccgacgacatggtccgaaacaccgccagagatctgctgtactacgccgtgacacaggacgccatgctgatcttcgagaatctgagcagaggcttcggccggcagggcaagagaacctttatggccgagaggcagtacaccagaatggaagattggctcacagctaaactggcctacgagggactgcccagcaagacctacctgtccaaaacactggcccagtatacctccaagacctgcagcaattgcggcttcaccatcaccagcgccgactacgacagagtgctggaaaagctcaagaaaaccgccaccggctggatgaccaccatcaacggcaaagagctgaaggttgagggccagatcacctactacaacaggtacaagaggcagaacgtcgtgaaggatctgagcgtggaactggacagactgagcgaagagagcgtgaacaacgacatcagcagctggacaaagggcagatcaggcgaggctctgagcctgctgaagaagaggtttagccacagacctgtgcaagagaagttcgtgtgcctgaactgcggcttcgagacacacgccgatgaacaggctgccctgaacattgccagaagctggctgttcctgagaagccaagagtacaagaagtaccagaccaacaagaccaccggcaacaccgacaagagggcctttgtggaaacctggcagagcttctacagaaaaaagctgaaagaagtctggaagcccgccgtg

SEQ ID NO: 27171 - DNA, 2937 bp, Artificial Sequence
  CasX Variant
caagagatcaagagaatcaacaagatcagaaggagactggtcaaggacagcaacacaaagaaggccggcaagacacggggccccatgaaaaccctgctcgtcagagtgatgacccctgacctgagagagcggctggaaaacctgagaaagaagcccgagaacatccctcagcctatcagcaacaccagcagggccaacctgaacaagctgctgaccgactacaccgagatgaagaaagccatcctgcacgtgtactgggaagagttccagaaagaccccgtgggcctgatgagcagagttgctcagcctgccagcaagaagatcgaccagaacaagctgaagcccgagatggacgagaagggcaatctgaccacagccggctttgcctgctctcagtgtggccagcctctgttcgtgtacaagctggaacaggtgtccgagaaaggcaaggcctacaccaactacttcggcagatgtaacgtggccgagcacgagaagctgattaagctggcccagctgaaacctgagaaggactctgatgaggccgtgacctacagcctgggcaagtttggacagagagccctggacttctacagcatccacgtgaccaaagaaagcacacaccccgtgaagcccctggctcagatcgccggcaatagatacgcctcttcccctgtgggcaaagccctgtccgatgcctgcatgggaacaatcgccagcttcctgagcaagtaccaggacatcatcatcgagcaccagaaggtggtcaagggcaaccagaagagactggaaagcctgagggagctggccggcaaagagaacctggaataccccagcgtgaccctgcctcctcagcctcacacaaaagaaggcgtggacgcctacaacgaagtgatcgccagagtgagaatgtgggtcaacctgaacctgtggcagaagctgaaactgtccagggacgacgccaagcctctgctgagactgaagggcttccctagcttccctctggtggaaagacaggccaatgaagtggattggtgggacatggtctgcaacgtgaagaagctgatcaacgagaagaaagaggatggcaaggttttctggcagaacctggccggctacaagagacaagaagccctgaggccttacctgagcagcgaagaggaccggaagaagggcaagaagttcgccagataccagctgggcgacctgctgctgcacctggaaaagaagcacggcgaggactggggcaaagtgtacgatgaggcctgggagagaatcgacaagaaggtggaaggcctgagcaagcacattaagctggaagaggaaagaaggagcgaggacgcccaatctaaagccgctctgaccgattggctgagagccaaggccagctttgtgatcgagggcctgaaagaggccgacaaggacgagttctgcagatgcgagctgaagctgcagaagtggtacggcgatctgagaggcaagcccttcgccattgaggccgagaacagcatcctggacatcagcggcttcagcaagcagtacaactgcgccttcatttggcagaaagacggcgtcaagaaactgaacctgtacctgatcatcaattacttcaaaggcggcaagctgcggttcaagaagatcaaacccgaggccttcgaggctaacagattctacaccgtgatcaacaaaaagtccggcgagatcgtgcccatggaagtgaacttcaacttcgacgaccccaacctgattatcctgcctctggccttcggcaagagacagggcagagagttcatctggaacgatctgctgagcctggaaaccggctctctgaagctggccaatggcagagtgatcgagaaaaccctgtacaacaggagaaccagacaggacgagcctgctctgtttgtggccctgaccttcgagagaagagaggtgctggacagcagcaacatcaagcccatgaacctgatcggcgtggaccggggcgagaatatccctgctgtgatcgccctgacagaccctgaaggatgcccactgagcagattcaaggactccctgggcaaccctacacacatcctgagaatcggcgagagctacaaagagaagcagaggacaatccaggccaagaaagaggtggaacagagaagagccggcggatactctaggaagtacgccagcaaggccaagaatctggccgacgacatggtccgaaacaccgccagagatctgctgtactacgccgtgacacaggacgccatgctgatcttcgagaatctgagcagaggcttcggccggcagggcaagagaacctttatggccgagaggcagtacaccagaatggaagattggctcacagctaaactggcctacgagggactgcccagcaagacctacctgtccaaaacactggcccagtatacctccaagacctgcagcaattgcggcttcaccatcaccagcgccgactacgacagagtgctggaaaagctcaagaaaaccgccaccggctggatgaccaccatcaacggcaaagagctgaaggttgagggccagatcacctactacaacaggtacaagaggcagaacgtcgtgaaggatctgagcgtggaactggacagactgagcgaagagagcgtgaacaacgacatcagcagctggacaaagggcagatcaggcgaggctctgagcctgctgaagaagaggtttagccacagacctgtgcaagagaagttcgtgtgcctgaactgcggcttcgagacacacgccgatgaacaggctgccctgaacattgccagaagctggctgttcctgagaagccaagagtacaagaagtaccagaccaacaagaccaccggcaacaccgacaagagggcctttgtggaaacctggcagagcttctacagaaaaaagctgaaagaagtctggaagcccgccgtg

SEQ ID NO: 27172 - DNA, 2937 bp, Artificial Sequence
  CasX Variant
caagagatcaagagaatcaacaagatcagaaggagactggtcaaggacagcaacacaaagaaggccggcaagacacggggccccatgaaaaccctgctcgtcagagtgatgacccctgacctgagagagcggctggaaaacctgagaaagaagcccgagaacatccctcagcctatcagcaacaccagcagggccaacctgaacaagctgctgaccgactacaccgagatgaagaaagccatcctgcacgtgtactgggaagagttccagaaagaccccgtgggcctgatgagcagagttgctcagcctgccagcaagaagatcgaccagaacaagctgaagcccgagatggacgagaagggcaatctgaccacagccggctttgcctgctctcagtgtggccagcctctgttcgtgtacaagctggaacaggtgtccgagaaaggcaaggcctacaccaactacttcggcagatgtaacgtggccgagcacgagaagctgattaagctggcccagctgaaacctgagaaggactctgatgaggccgtgacctacagcctgggcaagtttggacagagagccctggacttctacagcatccacgtgaccaaagaaagcacacaccccgtgaagcccctggctcagatcgccggcaatagatacgcctcttcccctgtgggcaaagccctgtccggcgcctgcatgggaacaatcgccagcttcctgagcaagtaccaggacatcatcatcgagcaccagaaggtggtcaagggcaaccagaagagactggaaagcctgagggagctggccggcaaagagaacctggaataccccagcgtgaccctgcctcctcagcctcacacaaaagaaggcgtggacgcctacaacgaagtgatcgccagagtgagaatgtgggtcaacctgaacctgtggcagaagctgaaactgtccagggacgacgccaagcctctgctgagactgaagggcttccctagcttccctctggtggaaagacaggccaatgaagtggattggtgggacatggtctgcaacgtgaagaagctgatcaacgagaagaaagaggatggcaaggttttctggcagaacctggccggctacaagagacaagaagccctgaggccttacctgagcagcgaagaggaccggaagaagggcaagaagttcgccagataccagctgggcgacctgctgctgcacctggaaaagaagcacggcgaggactggggcaaagtgtacgatgaggcctgggagagaatcgacaagaaggtggaaggcctgagcaagcacattaagctggaagaggaaagaaggagcgaggacgcccaatctaaagccgctctgaccgattggctgagagccaaggccagctttgtgatcgagggcctgaaagaggccgacaaggacgagttctgcagatgcgagctgaagctgcagaagtggtacggcgatctgagaggcaagcccttcgccattgaggccgagaacagcatcctggacatcagcggcttcagcaagcagtacaactgcgccttcatttggcagaaagacggcgtcaagaaactgaacctgtacctgatcatcaattacttcaaaggcggcaagctgcggttcaagaagatcaaacccgaggccttcgaggctaacagattctacaccgtgatcaacaaaaagtccggcgagatcgtgcccatggaagtgaacttcaacttcgacgaccccaacctgattatcctgcctctggccttcggcaagagacagggcagagagttcatctggaacgatctgctgagcctggaaaccggctctctgaagctggccaatggcagagtgatcgagaaaaccctgtacaacaggagaaccagacaggacgagcctgctctgtttgtggccctgaccttcgagagaagagaggtgctggacagcagcaacatcaagcccatgaacctgatcggcgtggaccggggcgagaatatccctgctgtgatcgccctgacagaccctgaaggatgcccactgagcagattcaaggactccctgggcaaccctacacacatcctgagaatcggcgagagctacaaagagaagcagaggacaatccaggccaagaaagaggtggaacagagaagagccggcggatactctaggaagtacgccagcaaggccaagaatctggccgacgacatggtccgaaacaccgccagagatctgctgtactacgccgtgacacaggacgccatgctgatcttcgagaatctgagcagaggcttcggccggcagggcaagagaacctttatggccgagaggcagtacaccagaatggaagattggctcacagctaaactggcctacgagggactgcccagcaagacctacctgtccaaaacactggcccagtatacctccaagacctgcagcaattgcggcttcaccatcaccagcgccgactacgacagagtgctggaaaagctcaagaaaaccgccaccggctggatgaccaccatcaacggcaaagagctgaaggttgagggccagatcacctactacaacaggtacaagaggcagaacgtcgtgaaggatctgagcgtggaactggacagactgagcgaagagagcgtgaacaacgacatcagcagctggacaaagggcagatcaggcgaggctctgagcctgctgaagaagaggtttagccacagacctgtgcaagagaagttcgtgtgcctgaactgcggcttcgagacacacgccgatgaacaggctgccctgaacattgccagaagctggctgttcctgagaagccaagagtacaagaagtaccagaccaacaagaccaccggcaacaccgacaagagggcctttgtggaaacctggcagagcttctacagaaaaaagctgaaagaagtctggaagcccgccgtg

SEQ ID NO: 27173-27175 - skipped (3 entries)

SEQ ID NO: 27176 - DNA, 60 bp, Artificial Sequence
  7.37 TTC PAM TS
agcgcgagcacagctaaggccacggagcgagacatctcggcccgaatgctgtcagcttca

SEQ ID NO: 27177 - DNA, 60 bp, Artificial Sequence; identical to SEQ ID NO: 255
  7.37 TTC PAM NTS

SEQ ID NO: 27178 - DNA, 60 bp, Artificial Sequence
  7.37 CTC PAM TS
agcgcgagcacagctaaggccacggagcgagacatctcggcccgagtgctgtcagcttca

SEQ ID NO: 27179 - DNA, 60 bp, Artificial Sequence
  7.37 CTC PAM NTS
tgaagctgacagcactcgggccgagatgtctcgctccgtggccttagctgtgctcgcgct

SEQ ID NO: 27180 - DNA, 60 bp, Artificial Sequence
  7.37 GTC PAM TS
agcgcgagcacagctaaggccacggagcgagacatctcggcccgactgctgtcagcttca

SEQ ID NO: 27181 - DNA, 60 bp, Artificial Sequence
  7.37 GTC PAM NTS
tgaagctgacagcagtcgggccgagatgtctcgctccgtggccttagctgtgctcgcgct

SEQ ID NO: 27182 - DNA, 60 bp, Artificial Sequence
  7.37 ATC PAM TS
agcgcgagcacagctaaggccacggagcgagacatctcggcccgattgctgtcagcttca

SEQ ID NO: 27183 - DNA, 60 bp, Artificial Sequence
  7.37 ATC PAM NTS
tgaagctgacagcaatcgggccgagatgtctcgctccgtggccttagctgtgctcgcgct

SEQ ID NO: 27184 - DNA, 60 bp, Artificial Sequence
  7.37 TTT PAM TS
agcgcgagcacagctaaggccacggagcgagacatctcggcccaaatgctgtcagcttca

SEQ ID NO: 27185 - DNA, 60 bp, Artificial Sequence
  7.37 TTT PAM NTS
tgaagctgacagcatttgggccgagatgtctcgctccgtggccttagctgtgctcgcgct

SEQ ID NO: 27186 - DNA, 60 bp, Artificial Sequence
  7.37 CTT PAM TS
agcgcgagcacagctaaggccacggagcgagacatctcggccctagtgctgtcagcttca

SEQ ID NO: 27187 - DNA, 60 bp, Artificial Sequence
  7.37 CTT PAM NTS
tgaagctgacagcacttgggccgagatgtctcgctccgtggccttagctgtgctcgcgct

SEQ ID NO: 27188 - DNA, 60 bp, Artificial Sequence
  7.37 GTT PAM TS
agcgcgagcacagctaaggccacggagcgagacatctcggccctactgctgtcagcttca

SEQ ID NO: 27189 - DNA, 60 bp, Artificial Sequence
  7.37 GTT PAM NTS
tgaagctgacagcagttgggccgagatgtctcgctccgtggccttagctgtgctcgcgct

SEQ ID NO: 27190 - DNA, 60 bp, Artificial Sequence
  7.37 ATT PAM TS
agcgcgagcacagctaaggccacggagcgagacatctcggccctattgctgtcagcttca

SEQ ID NO: 27191 - DNA, 60 bp, Artificial Sequence
  7.37 ATT PAM NTS
tgaagctgacagcaattgggccgagatgtctcgctccgtggccttagctgtgctcgcgct

SEQ ID NO: 27192 - DNA, 20 bp, Artificial Sequence
  spacer sequence
ggccgagatgtctcgctccg

SEQ ID NO: 27193 - DNA, 18 bp, Artificial Sequence
  spacer sequence
ggccgagatgtctcgctc

SEQ ID NO: 27194 - DNA, 19 bp, Artificial Sequence
  spacer sequence
ggccgagatgtctcgctcc

SEQ ID NO: 27195 - DNA, 34 bp, Artificial Sequence
  Scaffold 174 18-nt spacer primer
gagcgagacatctcggccctttgatgctccctcc

SEQ ID NO: 27196 - DNA, 35 bp, Artificial Sequence
  Scaffold 174 19-nt spacer primer
ggagcgagacatctcggccctttgatgctccctcc

SEQ ID NO: 27197 - RNA, 20 nt, Artificial Sequence
  spacer 11.30
aaggggcuccgcaccacgcc

SEQ ID NO: 27198 - RNA, 20 nt, Artificial Sequence
  spacer 12.7
cugcauucuaguugugguuu

SEQ ID NO: 27199 - protein, 11 aa, Artificial Sequence
  Nuclear Localization Signal
PAKRARRGYKC

SEQ ID NO: 27200 - protein, 11 aa, Artificial Sequence
  Nuclear Localization Signal
KLGPRKATGRW

SEQ ID NO: 27201 - protein, 7 aa, Artificial Sequence
  Nuclear Localization Signal
PRRKREE

SEQ ID NO: 27202 - protein, 7 aa, Artificial Sequence
  Nuclear Localization Signal
PYRGRKE

SEQ ID NO: 27203 - protein, 8 aa, Artificial Sequence
  Nuclear Localization Signal
PLRKRPRR

SEQ ID NO: 27204 - protein, 18 aa, Artificial Sequence
  Nuclear Localization Signal
PLRKRPRRGSPLRKRPRR

SEQ ID NO: 27205 - protein, 29 aa, Artificial Sequence
  Nuclear Localization Signal
PAAKRVKLDGGKRTADGSEFESPKKKRKV

SEQ ID NO: 27206 - protein, 37 aa, Artificial Sequence
  Nuclear Localization Signal
PAAKRVKLDGGKRTADGSEFESPKKKRKVGIHGVPAA

SEQ ID NO: 27207 - protein, 46 aa, Artificial Sequence
  Nuclear Localization Signal
PAAKRVKLDGGKRTADGSEFESPKKKRKVAEAAAKEAAAKEAAAKA

SEQ ID NO: 27208 - protein, 31 aa, Artificial Sequence
  Nuclear Localization Signal
PAAKRVKLDGGKRTADGSEFESPKKKRKVPG

SEQ ID NO: 27209 - protein, 15 aa, Artificial Sequence
  Nuclear Localization Signal
KRKGSPERGERKRHW

SEQ ID NO: 27210 - protein, 28 aa, Artificial Sequence
  Nuclear Localization Signal
KRTADSQHSTPPKTKRKVEFEPKKKRKV

SEQ ID NO: 27211 - protein, 38 aa, Artificial Sequence
  Nuclear Localization Signal
PKKKRKVGGSKRTADSQHSTPPKTKRKVEFEPKKKRKV

SEQ ID NO: 27212 - protein, 5 aa, Artificial Sequence
  linker
  SITE (2)..(5): individual amino acid residues may be present or absent
GGGGG

SEQ ID NO: 27213 - protein, 10 aa, Artificial Sequence
  linker
  SITE (3)..(4): grouped amino acid residues may be present or absent
  SITE (5)..(6): grouped amino acid residues may be present or absent
  SITE (7)..(8): grouped amino acid residues may be present or absent
  SITE (9)..(10): grouped amino acid residues may be present or absent
GSGSGSGSGS

SEQ ID NO: 27214 - protein, 4 aa, Artificial Sequence
  linker
PPPG

SEQ ID NO: 27215 - protein, 23 aa, Artificial Sequence
  linker
  SITE (8)..(11): grouped amino acid residues may be present or absent
  SITE (12)..(15): grouped amino acid residues may be present or absent
  SITE (16)..(19): grouped amino acid residues may be present or absent
  SITE (20)..(23): grouped amino acid residues may be present or absent
PPPGGGSGGGSGGGSGGGSGGGS

SEQ ID NO: 27216 - protein, 23 aa, Artificial Sequence
  linker
  SITE (1)..(4): grouped amino acid residues may be present or absent
  SITE (5)..(8): grouped amino acid residues may be present or absent
  SITE (9)..(12): grouped amino acid residues may be present or absent
  SITE (13)..(16): grouped amino acid residues may be present or absent
GGGSGGGSGGGSGGGSGGGSPPP

SEQ ID NO: 27217 - protein, 17 aa, Artificial Sequence
  linker
AEAAAKEAAAKEAAAKA

SEQ ID NO: 27218 - protein, 12 aa, Artificial Sequence
  linker
TPPKTKRKVEFE

SEQ ID NO: 27219 - RNA, 141 nt, Artificial Sequence
  scaffold variant
acuggcgcuuuuaucugauuacuuugagagccaucaccagcgacuaugucguaguggguaaagcugcacuaugggcgcagcgucaaugacgcugacgguacaggccagacaauuauugucugguauagugcagcaucaaag

SEQ ID NO: 27220 - RNA, 155 nt, Artificial Sequence
  scaffold variant
acuggcgcuuuuaucugauuacuuugagagccaucaccagcgacuaugucguaguggguaaagcugcacuaugggcgcagcaccugaggaucacccaggugcugacgguacaggccaccugaggaucacccaggugguauagugcagcaucaaag

SEQ ID NO: 27221 - RNA, 155 nt, Artificial Sequence
  scaffold variant
acuggcgcuuuuaucugauuacuuugagagccaucaccagcgacuaugucguaguggguaaagcugcacuaugggcgcagcgcaugaggaucacccaugcgcugacgguacaggccgcaugaggaucacccaugcgguauagugcagcaucaaag

SEQ ID NO: 27222 - RNA, 155 nt, Artificial Sequence
  scaffold variant
acuggcgcuuuuaucugauuacuuugagagccaucaccagcgacuaugucguaguggguaaagcugcacuaugggcgcagcgccugaggaucacccaggcgcugacgguacaggccgccugaggaucacccaggcgguauagugcagcaucaaag

SEQ ID NO: 27223 - RNA, 155 nt, Artificial Sequence
  scaffold variant
acuggcgcuuuuaucugauuacuuugagagccaucaccagcgacuaugucguaguggguaaagcugcacuaugggcgcagcgccugagcaucagccaggcgcugacgguacaggccgccugagcaucagccaggcgguauagugcagcaucaaag

SEQ ID NO: 27224 - RNA, 155 nt, Artificial Sequence
  scaffold variant
acuggcgcuuuuaucugauuacuuugagagccaucaccagcgacuaugucguaguggguaaagcugcacuaugggcgcagcacaugagcaucagccaugugcugacgguacaggccacaugagcaucagccaugugguauagugcagcaucaaag

SEQ ID NO: 27225 - RNA, 155 nt, Artificial Sequence
  scaffold variant
acuggcgcuuuuaucugauuacuuugagagccaucaccagcgacuaugucguaguggguaaagcugcacuaugggcgcagcacaugaguaucaaccaugugcugacgguacaggccacaugaguaucaaccaugugguauagugcagcaucaaag

SEQ ID NO: 27226 - RNA, 155 nt, Artificial Sequence
  scaffold variant
acuggcgcuuuuaucugauuacuuugagagccaucaccagcgacuaugucguaguggguaaagcugcacuaugggcgcagcacaugagaaucagccaugugcugacgguacaggccacaugagaaucagccaugugguauagugcagcaucaaag

SEQ ID NO: 27227 - RNA, 155 nt, Artificial Sequence
  scaffold variant
acuggcgcuuuuaucugauuacuuugagagccaucaccagcgacuaugucguaguggguaaagcugcacuaugggcgcagcccuugaggaucacccaugugcugacgguacaggccccuugaggaucacccaugugguauagugcagcaucaaag

SEQ ID NO: 27228 - RNA, 155 nt, Artificial Sequence
  scaffold variant
acuggcgcuuuuaucugauuacuuugagagccaucaccagcgacuaugucguaguggguaaagcugcacuaugggcgcagcacuugaggaucacccaugugcugacgguacaggccacuugaggaucacccaugugguauagugcagcaucaaag

SEQ ID NO: 27229 - RNA, 155 nt, Artificial Sequence
  scaffold variant
acuggcgcuuuuaucugauuacuuugagagccaucaccagcgacuaugucguaguggguaaagcugcacuaugggcgcagcaccugaggaucacccaugugcugacgguacaggccaccugaggaucacccaugugguauagugcagcaucaaag

SEQ ID NO: 27230 - RNA, 155 nt, Artificial Sequence
  scaffold variant
acuggcgcuuuuaucugauuacuuugagagccaucaccagcgacuaugucguaguggguaaagcugcacuaugggcgcagcacaugaggaucaccuaugugcugacgguacaggccacaugaggaucaccuaugugguauagugcagcaucaaag

SEQ ID NO: 27231 - RNA, 155 nt, Artificial Sequence
  scaffold variant
acuggcgcuuuuaucugauuacuuugagagccaucaccagcgacuaugucguaguggguaaagcugcacuaugggcgcagcacauuaggaucaccaaugugcugacgguacaggccacauuaggaucaccaaugugguauagugcagcaucaaag

SEQ ID NO: 27232 - RNA, 155 nt, Artificial Sequence
  scaffold variant
acuggcgcuuuuaucugauuacuuugagagccaucaccagcgacuaugucguaguggguaaagcugcacuaugggcgcagcacauuaggaucaccgaugugcugacgguacaggccacauuaggaucaccgaugugguauagugcagcaucaaag

SEQ ID NO: 27233 - RNA, 155 nt, Artificial Sequence
  scaffold variant
acuggcgcuuuuaucugauuacuuugagagccaucaccagcgacuaugucguaguggguaaagcugcacuaugggcgcagcacauuaggaucaccuaugugcugacgguacaggccacauuaggaucaccuaugugguauagugcagcaucaaag

SEQ ID NO: 27234 - RNA, 155 nt, Artificial Sequence
  scaffold variant
acuggcgcuuuuaucugauuacuuugagagccaucaccagcgacuaugucguaguggguaaagcugcacuaugggcgcagcacaugaggauuacccaugugcugacgguacaggccacaugaggauuacccaugugguauagugcagcaucaaag

SEQ ID NO: 27235 - RNA, 155 nt, Artificial Sequence
  scaffold variant
acuggcgcuuuuaucugauuacuuugagagccaucaccagcgacuaugucguaguggguaaagcugcacuaugggcgcagcacaugaggauaacccaugugcugacgguacaggccacaugaggauaacccaugugguauagugcagcaucaaag

SEQ ID NO: 27236 - RNA, 155 nt, Artificial Sequence
  scaffold variant
acuggcgcuuuuaucugauuacuuugagagccaucaccagcgacuaugucguaguggguaaagcugcacuaugggcgcagcacaugaggaugacccaugugcugacgguacaggccacaugaggaugacccaugugguauagugcagcaucaaag

SEQ ID NO: 27237 - RNA, 155 nt, Artificial Sequence
  scaffold variant
acuggcgcuuuuaucugauuacuuugagagccaucaccagcgacuaugucguaguggguaaagcugcacuaugggcgcagcacaugaggaccacccaugugcugacgguacaggccacaugaggaccacccaugugguauagugcagcaucaaag

SEQ ID NO: 27238 - RNA, 155 nt, Artificial Sequence
  scaffold variant
acuggcgcuuuuaucugauuacuuugagagccaucaccagcgacuaugucguaguggguaaagcugcacuaugggcgcagcagaugaggaucacccaugggcugacgguacaggccagaugaggaucacccaugggguauagugcagcaucaaag

SEQ ID NO: 27239 - RNA, 155 nt, Artificial Sequence
  scaffold variant
acuggcgcuuuuaucugauuacuuugagagccaucaccagcgacuaugucguaguggguaaagcugcacuaugggcgcagcacauggggaucacccaugugcugacgguacaggccacauggggaucacccaugugguauagugcagcaucaaag

SEQ ID NO: 27240 - RNA, 155 nt, Artificial Sequence
  scaffold variant
acuggcgcuuuuaucugauuacuuugagagccaucaccagcgacuaugucguaguggguaaagcugcacuaugggcgcagcacaugaggaucacccaugugcugacgguacaggccacaugaggaucacccaugugguauagugcagcaucaaag

SEQ ID NO: 27241 - RNA, 96 nt, Artificial Sequence
  scaffold variant
acuggcgcuuuuaucugauuacuuugagagccaucaccagcgacuaugucguaguggguaaagcucaccugaggaucacccaggugagcaucaaag

SEQ ID NO: 27242 - RNA, 96 nt, Artificial Sequence
  scaffold variant
acuggcgcuuuuaucugauuacuuugagagccaucaccagcgacuaugucguaguggguaaagcucgcaugaggaucacccaugcgagcaucaaag

SEQ ID NO: 27243 - RNA, 96 nt, Artificial Sequence
  scaffold variant
acuggcgcuuuuaucugauuacuuugagagccaucaccagcgacuaugucguaguggguaaagcucgccugaggaucacccaggcgagcaucaaag

SEQ ID NO: 27244 - RNA, 96 nt, Artificial Sequence
  scaffold variant
acuggcgcuuuuaucugauuacuuugagagccaucaccagcgacuaugucguaguggguaaagcucgccugagcaucagccaggcgagcaucaaag

SEQ ID NO: 27245 - RNA, 96 nt, Artificial Sequence
  scaffold variant
acuggcgcuuuuaucugauuacuuugagagccaucaccagcgacuaugucguaguggguaaagcucacaugagcaucagccaugugagcaucaaag

SEQ ID NO: 27246 - RNA, 96 nt, Artificial Sequence
  scaffold variant
acuggcgcuuuuaucugauuacuuugagagccaucaccagcgacuaugucguaguggguaaagcucacaugaguaucaaccaugugagcaucaaag

SEQ ID NO: 27247 - RNA, 96 nt, Artificial Sequence
  scaffold variant
acuggcgcuuuuaucugauuacuuugagagccaucaccagcgacuaugucguaguggguaaagcucacaugagaaucagccaugugagcaucaaag

SEQ ID NO: 27248 - RNA, 96 nt, Artificial Sequence
  scaffold variant
acuggcgcuuuuaucugauuacuuugagagccaucaccagcgacuaugucguaguggguaaagcucccuugaggaucacccaugugagcaucaaag

SEQ ID NO: 27249 - RNA, 96 nt, Artificial Sequence
  scaffold variant
acuggcgcuuuuaucugauuacuuugagagccaucaccagcgacuaugucguaguggguaaagcucacuugaggaucacccaugugagcaucaaag

SEQ ID NO: 27250 - RNA, 96 nt, Artificial Sequence
  scaffold variant
acuggcgcuuuuaucugauuacuuugagagccaucaccagcgacuaugucguaguggguaaagcucaccugaggaucacccaugugagcaucaaag

SEQ ID NO: 27251 - RNA, 96 nt, Artificial Sequence
  scaffold variant
acuggcgcuuuuaucugauuacuuugagagccaucaccagcgacuaugucguaguggguaaagcucacaugaggaucaccuaugugagcaucaaag

SEQ ID NO: 27252 - RNA, 96 nt, Artificial Sequence
  scaffold variant
acuggcgcuuuuaucugauuacuuugagagccaucaccagcgacuaugucguaguggguaaagcucacauuaggaucaccaaugugagcaucaaag

SEQ ID NO: 27253 - RNA, 96 nt, Artificial Sequence
  scaffold variant
acuggcgcuuuuaucugauuacuuugagagccaucaccagcgacuaugucguaguggguaaagcucacauuaggaucaccgaugugagcaucaaag

SEQ ID NO: 27254 - RNA, 96 nt, Artificial Sequence
  scaffold variant
acuggcgcuuuuaucugauuacuuugagagccaucaccagcgacuaugucguaguggguaaagcucacauuaggaucaccuaugugagcaucaaag

SEQ ID NO: 27255 - RNA, 96 nt, Artificial Sequence
  scaffold variant
acuggcgcuuuuaucugauuacuuugagagccaucaccagcgacuaugucguaguggguaaagcucacaugaggauuacccaugugagcaucaaag

SEQ ID NO: 27256 - RNA, 96 nt, Artificial Sequence
  scaffold variant
acuggcgcuuuuaucugauuacuuugagagccaucaccagcgacuaugucguaguggguaaagcucacaugaggauaacccaugugagcaucaaag

SEQ ID NO: 27257 - RNA, 96 nt, Artificial Sequence
  scaffold variant
acuggcgcuuuuaucugauuacuuugagagccaucaccagcgacuaugucguaguggguaaagcucacaugaggaugacccaugugagcaucaaag

SEQ ID NO: 27258 - RNA, 96 nt, Artificial Sequence
  scaffold variant
acuggcgcuuuuaucugauuacuuugagagccaucaccagcgacuaugucguaguggguaaagcucacaugaggaccacccaugugagcaucaaag

SEQ ID NO: 27259 - RNA, 96 nt, Artificial Sequence
  scaffold variant
acuggcgcuuuuaucugauuacuuugagagccaucaccagcgacuaugucguaguggguaaagcucagaugaggaucacccaugggagcaucaaag

SEQ ID NO: 27260 - RNA, 96 nt, Artificial Sequence
  scaffold variant
acuggcgcuuuuaucugauuacuuugagagccaucaccagcgacuaugucguaguggguaaagcucacauggggaucacccaugugagcaucaaag

SEQ ID NO: 27261 - RNA, 96 nt, Artificial Sequence
  scaffold variant
acuggcgcuucuaucugauuacucugagcgccaucaccagcgacuaugucguaguggguaaagcucacaugaggaucacccaugugagcaucagag

SEQ ID NO: 27262 - RNA, 145 nt, Artificial Sequence
  scaffold variant
acuggcgcuucuaucugauuacucugagcgccaucaccagcgacuaugucguaguggguaaagcugcacuaugggcgcagcgucaaugacgcugacgguacaggccacaugaggaucacccaugugguauagugcagcaucagag

SEQ ID NO: 27263 - RNA, 155 nt, Artificial Sequence
  scaffold variant
acuggcgcuucuaucugauuacucugagcgccaucaccagcgacuaugucguaguggguaaagcugcacuaugggcgcagcucaugaggaucacccaugagcugacgguacaggccacaugaggaucacccaugugguauagugcagcaucagag

SEQ ID NO: 27264 - RNA, 159 nt, Artificial Sequence
  scaffold variant
acuggcgcuucuaucugauuacucugagcgccaucaccagcgacuaugucguaguggguaaagcugcacuaugggcgcagacauggcagucguaacgacgcgggucugacgguacaggccacaugaggaucacccaugugguauagugcagcaucagag

SEQ ID NO: 27265 - RNA, 145 nt, Artificial Sequence
  scaffold variant
acuggcgcuuuuaucugauuacuuugagagccaucaccagcgacuaugucguaguggguaaagcugcacuauggggccacaugaggaucacccaugugguguacagcgcagcgucaaugacgcugacgauagugcagcaucaaag

SEQ ID NO: 27266 - RNA, 31 nt, Artificial Sequence
  stem loop
ugggcgcagcgucaaugacgcugacgguaca

SEQ ID NO: 27267 - RNA, 66 nt, Artificial Sequence
  stem loop
gcacuaugggcgcagcgucaaugacgcugacgguacaggccagacaauuauugucugguauagugc

SEQ ID NO: 27268 - RNA, 15 nt, Artificial Sequence
  stem loop
gcugacgguacaggc

SEQ ID NO: 27269 - RNA, 167 nt, Artificial Sequence
  stem loop
caggaagcacuaugggcgcagcgucaaugacgcugacgguacaggccagacaauuauugucugguauagugcagcagcagaacaauuugcugagggcuauugaggcgcaacagcaucuguugcaacucacagucuggggcaucaagcagcuccaggcaagaauccug

SEQ ID NO: 27270 - RNA, 234 nt, Artificial Sequence
  stem loop
aggagcuuuguuccuuggguucuugggagcagcaggaagcacuaugggcgcagcgucaaugacgcugacgguacaggccagacaauuauugucugguauagugcagcagcagaacaauuugcugagggcuauugaggcgcaacagcaucuguugcaacucacagucuggggcaucaagcagcuccaggcaagaauccuggcuguggaaagauaccuaaaggaucaacagcuccu
